(19) United States
(12) Patent Application Publication
(10) Pub. No.: US 2018/0021364 A1
(43) Pub. Date: Jan. 25, 2018

(54) CENTRAL NERVOUS SYSTEM TARGETING POLYNUCLEOTIDES

(71) Applicant: VOYAGER THERAPEUTICS, INC., CAMBRIDGE, MA (US)

(72) Inventors: Gregory Robert Stewart, Plymouth, MN (US); Dinah Wen-Yee Sah, Hopkinton, MA (US); Jinzhao Hou, Belmont, MA (US); Adrian Philip Kells, Arlington, MA (US); Martin Goulet, Weston, MA (US); Kartik Ramamoorthi, Pennington, NJ (US); Pengcheng Zhou, Lexington, MA (US); Yanqun Shu, Winchester, MA (US)

(21) Appl. No.: 15/543,773

(22) PCT Filed: Jan. 15, 2016
(86) PCT No.: PCT/US16/13671

§ 371 Date: Jul. 14, 2017

Related U.S. Application Data
(60) Provisional application No. 62/104,101, filed on Jan. 16, 2015.
(60) Provisional application No. 62/152,185, filed on Apr. 24, 2015.
(60) Provisional application No. 62/152,283, filed on Apr. 24, 2015.
(60) Provisional application No. 62/159,888, filed on May 11, 2015.
(60) Provisional application No. 62/159,882, filed on May 11, 2015.

(51) Int. Cl. A61K 31/7088; C07K 14/47; A61K 48/00

(52) U.S. Cl. CPC A61K 31/7088; A61K 48/005; A61K 48/0075; A61K 48/0083; C07K 14/47; C12N 2750/14143

(57) ABSTRACT

The invention relates to compositions and methods for the preparation, manufacture and therapeutic use of polynucleotides encoding payloads for the treatment of CNS disorders.

### CROSS REFERENCE TO RELATED APPLICATIONS

[0001] This application claims the benefit of U.S. Provisional Patent Application No. 62/104,101, entitled Methods of Delivery to the Central Nervous System, filed Jan. 16, 2015, U.S. Provisional Patent Application No. 62/152,185, entitled Methods of Delivery to the Central Nervous System, filed Apr. 24, 2015, U.S. Provisional Patent Application No. 62/152,283, entitled Central Nervous System Targeting Polynucleotides, filed Apr. 24, 2015, U.S. Provisional Patent Application No. 62/159,888, entitled Methods of Delivery to the Central Nervous System, filed May 11, 2015, U.S. Provisional Patent Application No. 62/159,882, entitled Central Nervous System Targeting Polynucleotides, filed May 11, 2015; the contents of each of which are herein incorporated by reference in their entirety.

### REFERENCE TO THE SEQUENCE LISTING

[0002] The present application is being filed along with a Sequence Listing in electronic format. The Sequence Listing is provided as a file entitled 1022PCT.txt created on Jan. 15, 2016 which is 635,539 bytes in size. The information in the electronic format of the sequence listing is incorporated herein by reference in its entirety.

### FIELD OF THE INVENTION

[0003] The present invention relates to compositions, methods and processes for the formulation and for the administration of a gene therapy agent using parvovirus e.g., adeno-associated virus (AAV) to the CNS, CNS tissues, CNS structures or CNS cells.

### BACKGROUND OF THE INVENTION

[0004] Use of adeno-associated virus (AAV) to deliver therapeutic agents (i.e., transgenes) to the central nervous system offers a means to achieve a widespread distribution of delivered genes in the CNS. Tissue of the CNS is highly heterogeneous and consists of different cell types including different types of neurons (e.g. excitatory and inhibitory neurons) and glial cells (e.g., oligodendrocytes, astrocytes and microglia). The characterization of different AAV capsid serotypes reveals that different AAV serotypes have different efficiency of transduction to different CNS tissues (e.g., cervical spinal cord and hippocampus) and cells (e.g., neurons or glial cells).

[0005] Studies, such as those referenced herein examining the targeting of specific tissues and cell types of the CNS by AAV capsids address one part of the problem of effective clinical treatment of CNS disorders by AAV delivery of therapeutic transgenes. The appropriate expression of the therapeutic transgene encoding the delivered payload, both temporally and spatially within the desired cell type, is critical to achieving the desired ameliorative effect. The properties of regulatory elements that drive expression of exogenous payloads from AAV genomes have not been well characterized.

[0006] On this background there remains, however, much work to be done to optimize delivery of therapeutic agents to the central nervous system. Better understanding and optimizing delivery parameters for viral particle distribution as described herein will lead to safer and more effective gene therapy. AAVs have emerged as one of the most widely studied and utilized viral particles for gene transfer to mammalian cells. See, e.g., Tratschin et al., Mol. Cell Biol., 5(11):3251-3260 (1985) and Grimm et al., Hum. Gene Ther., 10(15):2445-2450 (1999).

[0007] The present invention addresses the need for new technologies by providing AAV-based compositions and complexes which go beyond those of the art by providing for administration and/or delivery of recombinant adeno-associated viral particles in the treatment of diseases or disorders of the CNS, CNS tissues and/or CNS structures.

[0008] While delivery is exemplified in the AAV context, other viral vectors, non-viral vectors, nanoparticles, or liposomes may be similarly used to deliver the therapeutic transgenes and include, but are not limited to, vector genomes of any of the AAV serotypes or other parvoviral viral delivery vehicles or lentivirus, etc. The observations and teachings extend to any macromolecular structure, including modified cells, introduced into the CNS in the manner as described herein.

### SUMMARY OF THE INVENTION

[0009] The present invention provides AAV capsid serotypes with specific CNS cell type tropism, expression levels and bio-distribution in the CNS. Additionally, the present invention provides regulatory elements and codon optimization of the AAV genome useful in vitro and in vivo in both cell lines and primary CNS cell types. Accordingly, the present invention provides novel AAV particles with novel combinations of capsid and/or payload that target specific cells and/or tissue in a particular anatomic location in the CNS.

[0010] Described herein are compositions, methods, processes, kits and devices for the design, preparation, manufacture and/or formulation of AAV particles. In some embodiments, payloads, such as but not limited to AAV polynucleotides, may be encoded by payload constructs or contained within plasmids or vectors or recombinant adeno-associated viruses (AAVs).

[0011] The present invention also provides administration and/or delivery methods for vectors and viral particles, e.g., AAV particles, for the treatment or amelioration of diseases or disorders of the CNS. Such methods may involve the inhibition of gene expression, gene replacement or gene activation. Such outcomes are achieved by utilizing the methods and compositions taught herein.

[0012] The details of various embodiments of the invention are set forth in the description below. Other features, objects, and advantages of the invention will be apparent from the description and the drawings, and from the claims.

### BRIEF DESCRIPTION OF THE DRAWINGS

[0013] FIG. 1A-1D shows slab 1 and slab 2 individual and average frataxin expression on day 28 in mice treated via intracerebroventricular (ICV) or intracisternal (CM) administration.

[0014] FIG. 2A-2H shows frataxin mRNA expression levels in the CNS and other peripheral organs in tested monkeys after intrathecal (IT) L1 bolus dosing of each capsids.

[0015] FIG. 3A-3F shows frataxin expression profiles by the capsid serotypes across rostro-caudal spinal cord segments and dorsal root ganglia (DRG) in monkeys.

[0016] FIG. 4A-4B shows frataxin mRNA expression in dentate nucleus and liver for all tested capsids in monkeys.

### DETAILED DESCRIPTION OF THE INVENTION

[0017] Viruses of the Parvoviridae family are small non-enveloped icosahedral capsid viruses characterized by a single stranded DNA genome. Parvoviridae family viruses consist of two subfamilies: Parvovirinae, which infect vertebrates, and Densovirinae, which infect invertebrates. This virus family is used as a biological tool due to a relatively simple structure that may be easily manipulated with standard molecular biology techniques. The genome of the virus may be modified to contain a minimum of components for the assembly of a functional recombinant virus, or viral particle, which is loaded with or engineered to express or deliver a desired nucleic acid construct or payload, e.g., a transgene, polypeptide-encoding polynucleotide or modulatory nucleic acid, which may be delivered to a target cell, tissue or organism.

[0018] The parvoviruses and other members of the Parvoviridae family are generally described in Kenneth I. Berns, “Parvoviridae: The Viruses and Their Replication,” Chapter 69 in FIELDS VIROLOGY (3d Ed. 1996), the contents of which is incorporated by reference in its entirety.

[0019] The Parvoviridae family comprises the Dependovirus genus which includes adeno-associated viruses (AAVs) capable of replication in vertebrate hosts including, but not limited to, human, primate, bovine, canine, equine, and ovine species.

[0020] The details of one or more embodiments of the invention are set forth in the accompanying description below. Other features, objects and advantages of the invention will be apparent from the description. In the description, the singular forms also include the plural unless the context clearly dictates otherwise. Unless defined otherwise, all technical and scientific terms used herein have the same meaning as commonly understood by one of ordinary skill in the art to which this invention belongs. In the case of conflict, the present description will control.

Parvovirus, e.g. AAV Particle Payload: Transgenes, Polypeptide-Encoding Polynucleotides and/or Modulatory Nucleic Acids

[0021] In some embodiments, the present invention provides administration and/or delivery methods for vectors and viral particles, e.g., AAV particles, for the treatment and/or amelioration of diseases or disorders of the CNS (e.g., Friedreich's ataxia).

[0022] AAV particles of the present invention may comprise a nucleic acid sequence encoding at least one “payload.” As used herein, a “payload” or “payload construct” refers to one or more polynucleotides or polynucleotide regions encoded by or within a viral genome or an expression product of such polynucleotide or polynucleotide region, e.g., a transgene, a polynucleotide encoding a polypeptide or multi-polypeptide or a modulatory nucleic acid or regulatory nucleic acid.

[0023] The payload may comprise any nucleic acid known in the art which is useful for modulating the expression (by supplementation or gene replacement or by inhibition using a modulatory nucleic acid) in a target cell transduced or contacted with the AAV particle carrying the payload.

[0024] The payload construct may comprise a combination of coding and non-coding nucleic acid sequences.

[0025] In one embodiment, the nucleic acid sequence of the AAV particle may be a payload construct.

[0026] In one embodiment, the payload construct encodes more than one payload. As a non-limiting example, a payload construct encoding more than one payload may be replicated and packaged into a viral particle. A target cell transduced with a viral particle comprising more than one payload may express each of the payloads in a single cell.

[0027] In some embodiments, the payload construct may encode a coding or non-coding RNA.

[0028] In one embodiment, the payload is a polypeptide which may be a peptide or protein. A protein encoded by the payload construct may comprise a secreted protein, an intracellular protein, an extracellular protein, and/or a membrane protein. The encoded proteins may be structural or functional. Proteins encoded by the payload construct include, but are not limited to, mammalian proteins. The AAV particles described herein may be useful in the fields of human disease, antibodies, viruses, veterinary applications and a variety of in vivo and in vitro settings.

[0029] In some embodiments, AAV particles described herein are useful in the field of medicine for the treatment, palliation and/or amelioration of conditions or diseases such as, but not limited to, blood, cardiovascular, CNS, and/or genetic disorders.

[0030] In some embodiments, AAV particles in accordance with the present invention may be used for the treatment of disorders, and/or conditions, including but not limited to, neurological disorders (e.g. Alzheimer's disease, Huntington's disease; autism; Parkinson's disease; Spinal muscular atrophy, Friedreich's ataxia). In one embodiment, the payload encodes a messenger RNA (mRNA). As used herein, the term “messenger RNA” (mRNA) refers to any polynucleotide which encodes a polypeptide of interest and which is capable of being translated to produce the encoded polypeptide of interest in vitro, in vivo, in situ, or ex vivo.

[0031] The components of an mRNA include, but are not limited to, a coding region, a 5′UTR, a 3′UTR, a 5′ cap and a poly-A tail. In some embodiments, the encoded mRNA or any portion of the AAV genome may be codon optimized.

[0032] In one embodiment the protein encoded by the payload construct is between 50-5000 amino acids in length. In some embodiments the protein encoded is between 50-2000 amino acids in length. In some embodiments the protein encoded is between 50-1000 amino acids in length. In some embodiments the protein encoded is between 50-1500 amino acids in length. In some embodiments the protein encoded is between 50-1000 amino acids in length. In some embodiments the protein encoded is between 50-800 amino acids in length. In some embodiments the protein encoded is between 50-600 amino acids in length. In some embodiments the protein encoded is between 50-400 amino acids in length. In some embodiments the protein encoded is between 50-200 amino acids in length. In some embodiments the protein encoded is between 50-100 amino acids in length.

[0033] In some embodiments the peptide encoded by the payload construct is between 4-50 amino acids in length. In one embodiment, the shortest length of a region of the payload of the present invention encoding a peptide can be the length that is sufficient to encode for a tetrapeptide, a pentapeptide, a hexapeptide, a heptapeptide, an octapeptide, a nonapeptide, or a decapeptide. In another embodiment, the length may be sufficient to encode a peptide of 2-30 amino acids, e.g. 5-30, 10-30, 2-25, 5-25, 10-25, or 10-20 amino acids. The length may be sufficient to encode for a peptide of at least 11, 12, 13, 14, 15, 17, 20, 25 or 30 amino acids, or a peptide that is no longer than 50 amino acids, e.g. no longer than 35, 30, 25, 20, 17, 15, 14, 13, 12, 11 or 10 amino acids.

[0034] In one embodiment, an AAV particle comprises at least one polynucleotide, e.g., viral genome, encoding at least one payload.

[0035] In one embodiment, the AAV particle comprises an AAV capsid selected from the groups consisting of AAV1, AAV2, AAV3, AAV4, AAV5, AAV6, AAV7, AAV8, AAV9, AAV10, and AAV11, AAV12, AAVrh8, AAVrh10, AAV-DJ, and AAV-DJ/8 capsid serotypes, or variants thereof (e.g., AAV3A and AAV3B).

[0036] In one embodiment, the serotype which may be useful in the present invention may be AAVDJ8 (or AAV-DJ8). The amino acid sequence of AAVDJ8 may comprise two or more mutations in order to remove the heparin binding domain (HBD). As a non-limiting example, the AAV-DJ sequence described as SEQ ID NO: 1 in U.S. Pat. No. 7,588,772, the contents of which are herein incorporated by reference in their entirety, may comprise two mutations: (1) R587Q where arginine (R; arg) at amino acid 587 is changed to glutamine (Q; Gln) and (2) R590T where arginine (R; Arg) at amino acid 590 is changed to threonine (T; Thr). As another non-limiting example, may comprise three mutations: (1) K406R where lysine (K; Lys) at amino acid 406 is changed to arginine (R; Arg), (2) R587Q where arginine (R; Arg) at amino acid 587 is changed to glutamine (Q; Gln) and (3) R590T where arginine (R; Arg) at amino acid 590 is changed to threonine (T; Thr).

### Modulatory Nucleic Acids

[0037] An RNA encoded by the viral genome or DNA of the payload construct may also comprise a tRNA, rRNA, tmRNA, miRNA, RNAi, siRNA, piRNA, shRNA antisense RNA, double stranded RNA, snRNA, snoRNA, and long non-coding RNA (ncRNA). Examples of such lncRNA molecules and RNAi constructs designed to target such lncRNA any of which may be encoded in the payload constructs are taught in International Publication, WO2012/018881 A2, the content of which is incorporated by reference in their entirety.

[0038] In one embodiment, the payload construct encodes a microRNA or miRNA, or engineered precursors thereof, as the payload. These payloads along with siRNA, shRNA, antisense molecules and the like may also be referred to as “modulatory nucleic acid” payloads.

[0039] MicroRNAs (or miRNA) are 19-25 nucleotide long noncoding RNAs that bind to the 3′UTR of nucleic acid molecules and down-regulate gene expression either by reducing nucleic acid molecule stability or by inhibiting translation. The payload constructs described herein may encode one or more microRNA target sequences, microRNA sequences, or microRNA seeds, or any known precursors thereof such as pre- or pri-microRNAs. Such sequences may correspond to any known microRNA such as those taught in US Publication US2005/0261218 and US Publication US2005/0059005, the content of which is incorporated herein by reference in their entirety.

[0040] A microRNA sequence comprises a “seed” region, i.e., a sequence in the region of positions 2-8 of the mature microRNA, which sequence has perfect Watson-Crick complementarity to the miRNA target sequence. A microRNA seed may comprise positions 2-8 or 2-7 of the mature microRNA. In some embodiments, a microRNA seed may comprise 7 nucleotides (e.g., nucleotides 2-8 of the mature microRNA), wherein the seed-complementary site in the corresponding miRNA target is flanked by an adenine (A) opposed to microRNA position 1. In some embodiments, a microRNA seed may comprise 6 nucleotides (e.g., nucleotides 2-7 of the mature microRNA), wherein the seed-complementary site in the corresponding miRNA target is flanked by an adenine (A) opposed to microRNA position 1. See for example, Grimson A, Farh K K, Johnston W K, Garrett-Engele P, Lim L P, Bartel D P; Mol Cell. 2007 Jul. 6; 27(1):91-105; each of which is herein incorporated by reference in their entirety. The bases of the microRNA seed have complete complementarity with the target sequence.

[0041] When designed to inhibit or silence a gene, the AAV particles comprising payload constructs of the present invention may also encode a payload which may be processed to produce a siRNA, miRNA or other double stranded (ds) or single stranded (ss) gene modulatory nucleic acids or motifs.

[0042] Accordingly, the encoded siRNA duplexes or dsRNA can be used to inhibit gene expression in a cell, in particular cells of the CNS. In some aspects, the inhibition of gene expression refers to an inhibition by at least about 20%, preferably by at least about 30%, 40%, 50%, 60%, 70%, 80%, 85%, 90%, 95% and 100%. Accordingly, the protein product of the targeted gene may be inhibited by at least about 20%, preferably by at least about 30%, 40%, 50%, 60%, 70%, 80%, 85%, 90%, 95% and 100%. The gene can be either a wild type gene or a mutated gene with at least one mutation. Accordingly, the targeted protein is either wild type protein or a mutated protein with at least one mutation.

[0043] In some embodiments, the present invention provides methods for treating, or ameliorating a disease or condition associated with abnormal gene and/or protein in a subject in need of treatment, the method comprising administering to the subject any effective amount of at least one AAV particle encoding an siRNA duplex targeting the gene, delivering duplex into targeted cells, inhibiting the gene expression and protein production, and ameliorating symptoms of the disease or condition in the subject.

### Gene Replacement or Activation

[0044] When designed to increase the expression of a gene or replace a gene, AAV particles may comprise a viral genome comprising a payload construct which encodes a normal gene to replace a mutated, defective or nonfunctional copy of that gene in the recipient.

### Functional Payloads

[0045] In one embodiment, a payload may comprise polypeptides that serve as marker proteins to assess cell transformation and expression, fusion proteins, polypeptides having a desired biological activity, gene products that can complement a genetic defect, RNA molecules, transcription factors, and other gene products that are of interest in regulation and/or expression. In another embodiment, a payload may comprise nucleotide sequences that provide a desired effect or regulatory function (e.g., transposons, transcription factors).

[0046] The encoded payload may comprise a gene therapy product. A gene therapy product may include, but is not limited to, a polypeptide, RNA molecule, or other gene product that, when expressed in a target cell, provides a desired therapeutic effect. In some embodiments, a gene therapy product may comprise a substitute for a non-functional gene that is absent or mutated.

[0047] A payload construct encoding a payload may comprise or encode a selectable marker. A selectable marker may comprise a gene sequence or a protein encoded by a gene sequence expressed in a host cell that allows for the identification, selection, and/or purification of the host cell from a population of cells that may or may not express the selectable marker. In one embodiment, the selectable marker provides resistance to survive a selection process that would otherwise kill the host cell, such as treatment with an antibiotic. In another embodiment, an antibiotic selectable marker may comprise one or more antibiotic resistance factors, including but not limited to neomycin resistance (e.g., neo), hygromycin resistance, kanamycin resistance, and/or puromycin resistance.

[0048] In some embodiments, any nucleic acid sequence encoding a polypeptide can be used as a selectable marker comprising recognition by a specific antibody.

[0049] In some embodiments, a payload construct encoding a payload may comprise a selectable marker including, but not limited to, β-lactamase, luciferase, β-galactosidase, or any other reporter gene as that term is understood in the art, including cell-surface markers, such as CD4 or the truncated nerve growth factor (NGFR) (for GFP, see WO 96/23810; Heim et al., Current Biology 2:178-182 (1996); Heim et al., Proc. Natl. Acad. Sci. USA (1995); or Heim et al., Science 373:663-664 (1995); for β-lactamase, see WO 96/30540); the contents of each of which are herein incorporated by reference in their entirety.

[0050] In some embodiments, a payload construct encoding a selectable marker may comprise a fluorescent protein. A fluorescent protein as herein described may comprise any fluorescent marker including but not limited to green, yellow, and/or red fluorescent protein (GFP, YFP, and/or RFP).

[0051] In accordance with the invention, a payload comprising a nucleic acid for expression of a payload in a target cell will be incorporated into the viral genome and produced located between two ITR sequences, or on either side of an asymmetrical ITR engineered with two D regions.

[0052] A payload construct encoding one or more payloads for expression in a target cell may comprise one or more payload or non-payload nucleotide sequences operably linked to at least one target cell-compatible promoter. A person skilled in the art may recognize that a target cell may require a specific promoter including but not limited to a promoter that is species specific, inducible, tissue-specific, or cell cycle-specific Parr et al., Nat. Med. 3:1145-9 (1997).

### Promoters

[0053] A person skilled in the art may recognize that expression in a target cell may require a specific promoter, including but not limited to, a promoter that is species specific, inducible, tissue-specific, or cell cycle-specific (Parr et al., Nat. Med. 3:1145-9 (1997); the contents of which are herein incorporated by reference in its entirety).

[0054] In one embodiment, the promoter is deemed to be efficient for expression of the payload encoded in the viral genome of the AAV particle.

[0055] In one embodiment, the promoter is a promoter deemed to be efficient for driving expression in the cell being targeted.

[0056] In one embodiment, the promoter provides expression of a payload for a period of time in targeted tissues such as, but not limited to, nervous system tissues. Expression from a promoter may be for a period of 1 hour, 2, hours, 3 hours, 4 hours, 5 hours, 6 hours, 7 hours, 8 hours, 9 hours, 10 hours, 11 hours, 12 hours, 13 hours, 14 hours, 15 hours, 16 hours, 17 hours, 18 hours, 19 hours, 20 hours, 21 hours, 22 hours, 23 hours, 1 day, 2 days, 3 days, 4 days, 5 days, 6 days, 1 week, 8 days, 9 days, 10 days, 11 days, 12 days, 13 days, 2 weeks, 15 days, 16 days, 17 days, 18 days, 19 days, 20 days, 3 weeks, 22 days, 23 days, 24 days, 25 days, 26 days, 27 days, 28 days, 29 days, 30 days, 31 days, 1 month, 2 months, 3 months, 4 months, 5 months, 6 months, 7 months, 8 months, 9 months, 10 months, 11 months, 1 year, 13 months, 14 months, 15 months, 16 months, 17 months, 18 months, 19 months, 20 months, 21 months, 22 months, 23 months, 2 years, 3 years, 4 years, 5 years, 6 years, 7 years, 8 years, 9 years, 10 years or more than 10 years. Expression may be for 1-5 hours, 1-12 hours, 1-2 days, 1-5 days, 1-2 weeks, 1-3 weeks, 1-4 weeks, 1-2 months, 1-4 months, 1-6 months, 2-6 months, 3-6 months, 3-9 months, 4-8 months, 6-12 months, 1-2 years, 1-5 years, 2-5 years, 3-6 years, 3-8 years, 4-8 years or 5-10 years. In one embodiment, the promoter is a weak promoter for sustained expression of a payload in nervous tissues. In one embodiment, the promoter is a weak promoter for sustained frataxin expression in nervous system tissue such as, but not limited to, neuronal tissue and glial tissue.

[0057] In one embodiment, the Friedreich's ataxia (FRDA) promoter is used in the viral genomes of the AAV particles described herein.

[0058] In one embodiment, there is a region located approximately ˜5 kb upstream of the first exon of the encoded payload, more specifically, there is a 17 bp region located approximately 4.9 kb upstream of the first exon of the encoded fraxtaxin gene in order to allow for expression with the FRDA promoter (See e.g., Puspasari et al. Long Range Regulation of Human FXN Gene Expression, PLOS ONE, 2011; the contents of which is herein incorporated by reference in its entirety).

[0059] In one embodiment, the promoter may be a promoter which is less than 1 kb. The promoter may have a length of 200, 210, 220, 230, 240, 250, 260, 270, 280, 290, 300, 310, 320, 330, 340, 350, 360, 370, 380, 390, 400, 410, 420, 430, 440, 450, 460, 470, 480, 490, 500, 510, 520, 530, 540, 550, 560, 570, 580, 590, 600, 610, 620, 630, 640, 650, 660, 670, 680, 690, 700, 710, 720, 730, 740, 750, 760, 770, 780, 790, 800 or more than 800. The promoter may have a length between 200-300, 200-400, 200-500, 200-600, 200-700, 200-800, 300-400, 300-500, 300-600, 300-700, 300-800, 400-500, 400-600, 400-700, 400-800, 500-600, 500-700, 500-800, 600-700, 600-800 or 700-800.

[0060] In one embodiment, the promoter may be a combination of two or more components of the same or different promoters such as, but not limited to, CMV and CBA. Each component may have a length of 200, 210, 220, 230, 240, 250, 260, 270, 280, 290, 300, 310, 320, 330, 340, 350, 360, 370, 380, 381, 382, 383, 384, 385, 386, 387, 388, 389, 390, 400, 410, 420, 430, 440, 450, 460, 470, 480, 490, 500, 510, 520, 530, 540, 550, 560, 570, 580, 590, 600, 610, 620, 630, 640, 650, 660, 670, 680, 690, 700, 710, 720, 730, 740, 750, 760, 770, 780, 790, 800 or more than 800. Each component may have a length between 200-300, 200-400, 200-500, 200-600, 200-700, 200-800, 300-400, 300-500, 300-600, 300-700, 300-800, 400-500, 400-600, 400-700, 400-800, 500-600, 500-700, 500-800, 600-700, 600-800 or 700-800. In one embodiment, the promoter is a combination of a 382 nucleotide CMV-enhancer sequence and a 260 nucleotide CBA-promoter sequence.

[0061] In one embodiment, the payload construct of the viral genome comprises at least one element to enhance the transgene target specificity and expression (See e.g., Powell et al. Viral Expression Cassette Elements to Enhance Transgene Target Specificity and Expression in Gene Therapy, 2015; the contents of which are herein incorporated by reference in its entirety). Non-limiting examples of elements to enhance the transgene target specificity and expression include promoters, endogenous miRNAs, post-transcriptional regulatory elements (PREs), polyadenylation (PolyA) signal sequences and upstream enhancers (USEs), CMV enhancers and introns.

[0062] Promoters which promote expression in most tissues include, but are not limited to, human elongation factor 1α-subunit (EF1α), immediate-early cytomegalovirus (CMV), chicken β-actin (CBA) and its derivative CAG, the β glucuronidase (GUSB), or ubiquitin C (UBC). Tissue-specific expression elements can be used to restrict expression to certain cell types such as, but not limited to, nervous system promoters which can be used to restrict expression to neurons, astrocytes, or oligodendrocytes. Non-limiting example of tissue-specific expression elements for neurons include neuron-specific enolase (NSE), platelet-derived growth factor (PDGF), platelet-derived growth factor B-chain (PDGF-β), the synapsin (Syn), the methyl-CpG binding protein 2 (MeCP2), Ca²⁺/calmodulin-dependent protein kinase II (CaMKII), metabotropic glutamate receptor 2 (mGluR2), NFL, NFH, nβ2, PPE, Enk and EAAT2 promoters. A non-limiting example of a tissue-specific expression elements for astrocytes include the glial fibrillary acidic protein (GFAP) and EAAT2 promoters. A non-limiting example of a tissue-specific expression element for oligodendrocytes includes the myelin basic protein (MBP) promoter.

[0063] In one embodiment, the encoded payload construct comprises a ubiquitous promoter. Non-limiting examples of ubiquitous promoters include CMV, CBA (including derivatives CAG, CBh, etc.), EF-1α, PGK, UBC, GUSB (hGBp), and UCOE (promoter of HNRPA2B1-CBX3).

[0064] Yu et al. (Molecular Pain 2011, 7:63; the contents of which are herein incorporated by reference in its entirety) evaluated the expression of eGFP under the CAG, EFIα, PGK and UBC promoters in rat DRG cells and primary DRG cells using lentiviral vectors and found that UBC showed weaker expression than the other 3 promoters and there was only 10-12% glia expression seen for all promoters. Soderblom et al. (E. Neuro 2015; the contents of which are herein incorporated by reference in its entirety) evaluated the expression of eGFP in AAV8 with CMV and UBC promoters and AAV2 with the CMV promoter after injection in the motor cortex. Intranasal administration of a plasmid containing a UBC or EFIα promoter showed a sustained airway expression greater than the expression with the CMV promoter (See e.g., Gill et al., Gene Therapy 2001, Vol. 8, 1539-1546; the contents of which are herein incorporated by reference in its entirety). Husain et al. (Gene Therapy 2009; the contents of which are herein incorporated by reference in its entirety) evaluated a HβH construct with a hGUSB promoter, a HSV-1LAT promoter and a NSE promoter and found that the HβH construct showed weaker expression than NSE in mice brain. Passini and Wolfe (J. Virol. 2001, 12382-12392, the contents of which are herein incorporated by reference in its entirety) evaluated the long term effects of the HβH vector following an intraventricular injection in neonatal mice and found that there was sustained expression for at least 1 year. Low expression in all brain regions was found by Xu et al. (Gene Therapy 2001, 8, 1323-1332; the contents of which are herein incorporated by reference in its entirety) when NF-L and NF-H promoters were used as compared to the CMV-lacZ, CMV-luc, EF, GFAP, hENK, nAChR, PPE, PPE+wpre, NSE (0.3 kb), NSE (1.8 kb) and NSE (1.8 kb+wpre). Xu et al. found that the promoter activity in descending order was NSE (1.8 kb), EF, NSE (0.3 kb), GFAP, CMV, hENK, PPE, NFL and NFH. NFL is a 650 nucleotide promoter and NFH is a 920 nucleotide promoter which are both absent in the liver but NFH is abundant in the sensory proprioceptive neurons, brain and spinal cord and NFH is present in the heart. Scn8a is a 470 nucleotide promoter which expresses throughout the DRG, spinal cord and brain with particularly high expression seen in the hippocampal neurons and cerebellar Purkinje cells, cortex, thalamus and hypothalamus (See e.g., Drews et al. Identification of evolutionary conserved, functional noncoding elements in the promoter region of the sodium channel gene SCN8A, Mamm Genome (2007) 18:723-731; and Raymond et al. Expression of Alternatively Spliced Sodium Channel α-subunit genes, Journal of Biological Chemistry (2004) 279(44) 46234-46241; the contents of each of which are herein incorporated by reference in their entireties).

[0065] Any of the promoters taught by Yu, Soderblom, Gill, Husain, Passini, Xu, Drews or Raymond may be used in the present inventions.

[0066] In one embodiment, the encoded payload construct comprises a promoter which is not cell specific.

[0067] In one embodiment, the encoded payload construct comprises an ubiquitin c (UBC) promoter. The UBC promoter may have a size of 300-350 nucleotides. As a non-limiting example, the UBC promoter is 332 nucleotides.

[0068] In one embodiment, the encoded payload construct comprises a β-glucuronidase (GUSB) promoter. The GUSB promoter may have a size of 350-400 nucleotides. As a non-limiting example, the GUSB promoter is 378 nucleotides. As a non-limiting example, the construct may be AAV-promoter-CMV/globin intron-hFXN-RBG, where the AAV may be self-complementary and the AAV may be the DJ serotype.

[0069] In one embodiment, the payload construct comprises a neurofilament (NFL) promoter. The NFL promoter may have a size of 600-700 nucleotides. As a non-limiting example, the NFL promoter is 650 nucleotides. As a non-limiting example, the construct may be AAV-promoter-CMV/globin intron-hFXN-RBG, where the AAV may be self-complementary and the AAV may be the DJ serotype.

[0070] In one embodiment, the payload construct comprises a neurofilament heavy (NFH) promoter. The NFH promoter may have a size of 900-950 nucleotides. As a non-limiting example, the NFH promoter is 920 nucleotides. As a non-limiting example, the construct may be AAV-promoter-CMV/globin intron-hFXN-RBG, where the AAV may be self-complementary and the AAV may be the DJ serotype.

[0071] In one embodiment, the payload construct comprises a scn8a promoter. The scn8a promoter may have a size of 450-500 nucleotides. As a non-limiting example, the scn8a promoter is 470 nucleotides. As a non-limiting example, the construct may be AAV-promoter-CMV/globin intron-hFXN-RBG, where the AAV may be self-complementary and the AAV may be the DJ serotype.

[0072] In one embodiment, the payload construct comprises a frataxin (FXN) promoter.

[0073] In one embodiment, the payload construct comprises a phosphoglycerate kinase 1 (PGK) promoter.

[0074] In one embodiment, the payload construct comprises a chicken β-actin (CBA) promoter.

[0075] In one embodiment, the payload construct comprises an immediate-early cytomegalovirus (CMV) promoter.

[0076] In one embodiment, the payload construct comprises a liver or a skeletal muscle promoter. Non-limiting examples of liver promoters include hAAT and TBG. Non-limiting examples of skeletal muscle promoters include Desmin, MCK and C5-12.

[0077] In one embodiment, the payload construct comprises an enhancer element, a promoter and/or a 5′UTR intron. The enhancer element, also referred to herein as an “enhancer,” may be, but is not limited to, a CMV enhancer, the promoter may be, but is not limited to, a CMV, CBA, UBC, GUSB, NSE, Synapsin, MeCP2, and GFAP promoter and the 5′UTR/intron may be, but is not limited to, SV40, and CBA-MVM. As a non-limiting example, the enhancer, promoter and/or intron used in combination may be: (1) CMV enhancer, CMV promoter, SV40 5′UTR intron; (2) CMV enhancer, CBA promoter, SV 40 5′UTR intron; (3) CMV enhancer, CBA promoter, CBA-MVM 5′UTR intron; (4) UBC promoter; (5) GUSB promoter; (6) NSE promoter; (7) Synapsin promoter; (8) MeCP2 promoter and (9) GFAP promoter.

[0078] In one embodiment, the payload construct has an engineered promoter.

[0079] In one embodiment, the payload construct comprises a promoter which provides expression for at least 1 month, 2 months, 3 months, 4 months, 5 months, 6 months, 7 months, 8 months, 9 months, 10 months, 11 months, 1 year, 2 years, 3 years 4 years, 5 years, 6 years, 7 years, 8 years, 9 years, 10 years, 11 years, 12 years, 13 years, 14 years, 15 years, 16 years, 17 years, 18 years, 19 years, 20 years, 21 years, 22 years, 23 years, 24 years, 25 years, 26 years, 27 years, 28 years, 29 years, 30 years, 31 years, 32 years, 33 years, 34 years, 35 years, 36 years, 37 years, 38 years, 39 years, 40 years, 41 years, 42 years, 43 years, 44 years, 45 years, 46 years, 47 years, 48 years, 49 years, 50 years, 55 years, 60 years, 65 years, or more than 65 years.

### Introns

[0080] In one embodiment, the payload construct comprises at least one element to enhance the transgene expression such as one or more introns or portions thereof. Non-limiting examples of introns include, MVM (67-97 bps), F.IX truncated intron 1 (300 bps), β-globin SD/immunoglobulin heavy chain splice acceptor (250 bps), adenovirus splice donor/immunoglobin splice acceptor (500 bps), SV40 late splice donor/splice acceptor (19S/16S) (180 bps) and hybrid adenovirus splice donor/IgG splice acceptor (230 bps).

[0081] In one embodiment, the intron or intron portion may be 100-500 nucleotides in length. The intron may have a length of 80, 90, 100, 110, 120, 130, 140, 150, 160, 170, 171, 172, 173, 174, 175, 176, 177, 178, 179, 180, 190, 200, 210, 220, 230, 240, 250, 260, 270, 280, 290, 300, 310, 320, 330, 340, 350, 360, 370, 380, 390, 400, 410, 420, 430, 440, 450, 460, 470, 480, 490 or 500. The intron may have a length between 80-100, 80-120, 80-140, 80-160, 80-180, 80-200, 80-250, 80-300, 80-350, 80-400, 80-450, 80-500, 200-300, 200-400, 200-500, 300-400, 300-500, or 400-500.

### Viral Production

[0082] The present disclosure provides a method for the generation of parvovirus particle, e.g., AAV particle, by viral genome replication in a viral replication cell comprising contacting the viral replication cell with a payload construct vector and a viral construct vector.

[0083] The present disclosure provides a method for producing an AAV particle having enhanced (increased, improved) transduction efficiency comprising the steps of: 1) co-transfecting competent bacterial cells with a bacmid vector and either a viral construct vector and/or payload construct vector, 2) isolating the resultant viral construct vector and payload construct vector and separately transfecting viral replication cells, 3) isolating and purifying resultant payload and viral construct particles comprising viral construct vector or payload construct vector, 4) co-infecting a viral replication cell with both the payload construct vector and viral construct vector, 5) harvesting and purifying the viral particle comprising a parvoviral genome. Production methods are further disclosed in commonly owned and co-pending International Publication No. WO2015191508, the contents of which are herein incorporated by reference in their entirety.

### Particles and Capsids

[0084] The invention also provides nucleic acids encoding the mutated or modified virus capsids and capsid proteins of the invention. In some embodiments the capsids are engineered according to the methods of co-owned and co-pending International Publication No. WO2015191508, the contents of which are herein incorporated by reference in their entirety.

[0085] Further provided are particles comprising the nucleic acids and cells (in vivo or in culture) comprising the nucleic acids and/or particles of the invention. Suitable particles include without limitation viral particles (e.g., adenovirus, AAV, herpes virus, vaccinia, poxviruses, baculoviruses, and the like), plasmids, phage, YACs, BACs, and the like as are well known in the art. Such nucleic acids, particles and cells can be used, for example, as reagents (e.g., helper packaging constructs or packaging cells) for the production of modified virus capsids or virus particles as described herein.

[0086] The molecules of the invention which contain payload constructs include any genetic element (vector) which may be delivered to a host cell, e.g., naked DNA, plasmid, phage, transposon, cosmid, episome, a protein in a non-viral delivery vehicle (e.g., a lipid-based carrier), virus, etc., which transfers the sequences carried thereon. The methods used to construct any embodiment of this invention are known to those with skill in nucleic acid manipulation and include genetic engineering, recombinant engineering, and synthetic techniques. See, e.g., Sambrook et al, Molecular Cloning: A Laboratory Manual, Cold Spring Harbor Press, Cold Spring Harbor, N.Y.

[0087] The transgene or payload can be carried on any suitable vector, e.g., a plasmid, which is delivered to a host cell. The plasmids useful in this invention may be engineered such that they are suitable for replication and, optionally, integration in prokaryotic cells, mammalian cells, or both. These plasmids contain sequences permitting replication of the transgene in eukaryotes and/or prokaryotes and selection markers for these systems. Selectable markers or reporter genes may include sequences encoding geneticin, hygromicin or purimycin resistance, among others. The plasmids may also contain certain selectable reporters or marker genes that can be used to signal the presence of the vector in bacterial cells, such as ampicillin resistance. Other components of the plasmid may include an origin of replication and an amplicon, such as the amplicon system employing the Epstein Barr virus nuclear antigen. This amplicon system, or other similar amplicon components permit high copy episomal replication in the cells. Preferably, the molecule carrying the transgene or payload is transfected into the cell, where it may exist transiently. Alternatively, the transgene may be stably integrated into the genome of the host cell, either chromosomally or as an episome. In certain embodiments, the transgene may be present in multiple copies, optionally in head-to-head, head-to-tail, or tail-to-tail concatamers. Suitable transfection techniques are known and may readily be utilized to deliver the transgene to the host cell.

[0088] In one embodiment, the AAV particles of the invention may be a single-stranded AAV (ssAAV) or a self-complementary AAV (scAAV) described herein or known in the art.

### AAV Capsid Serotypes

[0089] In some embodiments, viral vectors and viral particles produced according to the present invention may target to deliver and/or to transfer a payload of interest to specific population of cells in specific anatomical regions (e.g., dopaminergic (DAergic) neurons in the Substantia Nigra (SN)) in the central nervous system).

[0090] In some embodiments, viral vectors and viral particles of the present invention may be packaged in a capsid structure or may be capsid free. Such capsid free viral vector donor and/or acceptor sequences such as AAV, are described in, for example, US Publication 20140107186, the content of which is incorporated by reference in its entirety.

[0091] In some embodiments, viral vectors and viral particles produced according to the present invention may comprise different capsid proteins, either naturally occurring and/or recombinant, including, but not limited to, AAV1, AAV2, AAV3, AAV4, AAV5, AAV6, AAV7, AAV8, AAV9, AAV10, and AAV11, AAV12, AAVrh8, AAVrh10, AAV-DJ, and AAV-DJ/8 capsid serotypes, or variants thereof (e.g., AAV3A and AAV3B). Nucleic acid sequences encoding one or more AAV capsid proteins useful in the present invention are disclosed in the commonly owned International Publication No. WO2015191508, the contents of which are herein incorporated by reference in their entirety.

[0092] In some embodiments, viral vectors and viral particles produced according to the present invention may comprise hybrid serotypes with enhanced transduction to specific cell types of interest in the central nervous system, prolonged transgene expression and/or a safety profile. The hybrid serotypes may be generated by transcapsidation, adsorption of bi-specific antibody to capsid surface, mosaic capsid, and chimeric capsid, and/or other capsid protein modifications.

[0093] The naturally occurring AAV Cap gene expresses VP1, VP2, and VP3 capsid proteins are encoded by a single open reading frame of the Cap gene under control of the p40 promoter. In one embodiment, nucleotide sequences encoding VP1, VP2 and VP3 proteins and/or amino acid sequences of AAV VP capsid proteins may be modified for increased efficiency to target to the central nervous system (e.g., CNS tissue tropism). Any of the VP genes of the serotypes selected from, but not limited to, AAV1, AAV2, AAV3, AAV4, AAV5, AAV6, AAV7, AAV8, AAV9, AAV10, and AAV11, AAV12, AAVrh8, AAVrh10, AAV-DJ, and AAV-DJ/8 capsid serotypes, or variants thereof (e.g., AAV3A and AAV3B) may be modified.

[0094] In some embodiments, viral vectors and viral particles of the present invention may be further modified toward a specific therapeutic application. The modification may be done by rational mutagenesis of capsid proteins (see, e.g., Pulicherla et al., Mol Ther, 2011, 19: 1070-1078), incorporation of peptide ligands to the capsid, for example a peptide derived from an NMDA receptor agonist for enhanced retrograde transport (Xu et al., Virology, 2005, 341: 203-214), and directed evolution to produce new AAV variants for increased CNS transduction.

[0095] In one embodiment, viral vectors and viral particles of the present invention may comprise capsid proteins having sequences of SEQ ID NOs: 1 and 3, which have increased tropism to the brain, of International Publication No. WO2014160092, the content of which is incorporated herein by reference in its entirety.

[0096] In one embodiment, viral vectors and viral particles of the present invention may comprise capsid proteins which may target to oligodendrocytes in the central nervous system. The capsid proteins may comprise AAV capsid coding sequence of SEQ ID NO: 1 or AAV capsid proteins comprising amino acid sequences of SEQ ID NOs: 2 to 4 of International Publication No. WO2014052789, the content of which is herein incorporated by reference in its entirety.

[0097] In one embodiment, viral vectors and viral particles of the present invention may comprise capsid proteins having increased capacity to cross the blood-brain barrier in CNS as disclosed in U.S. Pat. No. 8,927,514, the content of which is incorporated herein by reference in its entirety. The amino acid sequences and nucleic acid sequences of such capsid proteins may include, but are not limited to, SEQ ID NOs: 2-17 and SEQ ID NOs: 25-33, respectively, of U.S. Pat. No. 8,927,514.

[0098] In some embodiments, viral vectors and viral particles of the present invention may comprise AAV2 capsid proteins or variants thereof. Viral particles with AAV2 capsid proteins have been shown to deliver genes to neurons effectively in the brain, retina and spinal cord. In one embodiment, AAV2 capsid proteins may be further modified such as addition of a targeting peptide to the capsid proteins that targets an AAV particle to brain vascular endothelium as disclosed in U.S. Pat. Nos. 6,691,948 and 8,299,215, the contents of each of which are herein incorporated by reference in their entirety. Such viral particles may be used to deliver a functional payload of interest to treat a brain disease such as mucopolysaccharide (MPS).

[0099] In some embodiments, viral vectors and viral particles of the present invention may comprise AAV5 capsid proteins or variants thereof. Viral particles with AAV5 capsid proteins can transduce neurons in various regions of the CNS, including the cortex, the hippocampus (HPC), cerebellum, substantia nigra (SN), striatum, globus pallidus, and spinal cord (Burger C et al., Mol Ther., 2004, 10(2): 302-317; Liu G et al., Mol Ther. 2007, 15(2): 242-247; and Colle M et al., Hum, Mol. Genet. 2010, 19(1): 147-158). In one embodiment, viral particles having AA5 capsid proteins with increased transduction to cells in CNS may be those particles from U.S. Pat. No. 7,056,502, the content of which is incorporated herein by reference in its entirety.

[0100] In some embodiments, viral vectors and viral particles of the present invention may comprise AAV6 capsid proteins or variants thereof. Recombinant AAV6 serotype can target motor neurons in the spinal cord by Intracerebroventricular (ICV) injection (Dirren E et al., Hum Gene Ther., 2014, 25(2): 109-120). In addition, a study from San Sebastian et al indicated that AAV6 serotype can be retrogradely transported from terminals to neuronal cell bodies in the rat brain (San Sebastian et al, Gen Ther., 2014, 20(12): 1178-1183).

[0101] In some embodiments, viral vectors and viral particles of the present invention may comprise AAV8 capsid proteins or variants thereof. Viral particles with AAV8 capsid proteins can transduce neurons, for example in hippocampus (Klein R L et al., Mol Ther., 2006, 13(3): 517-527). In one embodiment, AAV8 capsid proteins may comprise the amino acid sequence of SEQ ID NO: 2 of U.S. Pat. No. 8,318,480, the content of which is herein incorporated by reference in its entirety.

[0102] In some embodiments, viral vectors and viral particles of the present invention may comprise AAV9 capsid proteins or variants thereof. AAV9 capsid serotype mediated gene delivery has been observed in the brain with efficient and long-term expression of transgene after intraparenchymal injections to the CNS (Klein R L et al., Eur J Neurosci., 2008, 27: 1615-1625). AAV9 serotype can produce robust and wide-scale neuronal transduction throughout the CNS after a peripheral, systemic (e.g., intravenous) administration in neonatal subjects (Foust K D et al., Nat. Biotechnol., 2009, 27: 59-65; and Duque S et al, Mol Ther., 2009, 17: 1187-1196). Intrathecal (intra-cisterna magna routes) administration of AAV9 serotypes can also produce widespread spinal expression. In one embodiment, AAV9 serotype may comprise an AAV capsid protein having the amino acid sequence of SEQ ID NO: 2 of U.S. Pat. No. 7,198,951, the content of which is incorporated herein by reference in its entirety. In another aspect, AAV 9 serotype may comprise VP1 capsid proteins of SEQ ID NOs: 2, 4 or 6 in which at least one of surface-exposed tyrosine residues in the amino acid sequence is substituted with another amino acid residue, as disclosed in US patent publication No. US20130224836, the content of which is incorporated herein by reference in its entirety.

[0103] In some embodiments, viral vectors and viral particles of the present invention may comprise AAVrh10 capsid proteins or variants thereof. Viral particles comprising AAVrh10 capsid proteins can target neurons, other cells as well, in the spinal cord after intrathecal (IT) administration. In one embodiment, AAVrh10 capsid proteins may comprise the amino acid sequence of SEQ ID NO: 81 of EP patent NO: 2341068.

[0104] In some embodiments, viral vectors and viral particles of the present invention may comprise AAVDJ capsid proteins, AAVDJ/8 capsid proteins, or variants thereof. Holehonnur et al showed that AVDJ/8 serotype can target neurons within the Basal and Lateral Amygdala (BLA) (Holennur R et al., BMC Neurosci, 2014, February 18:15:28). In one embodiment, AAVDJ capsid proteins and/or AAVDJ/8 capsid proteins may comprise an amino acid sequence comprising a first region that is derived from a first AAV serotype (e.g., AAV2), a second region that is derived from a second AAV serotype (e.g., AAV8), and a third region that is derived from a third AAV serotype (e.g., AAV9), wherein the first, second and third region may include any amino acid sequences that are disclosed in this description.

[0105] In some embodiment, viral vectors and viral particles produced according to the present invention may comprise single stranded DNA viral genomes (ssAAVs) or self-complementary AAV genomes (scAAVs). scAAV genomes contain both DNA strands which anneal together to form double stranded DNA. By skipping second strand synthesis, scAAVs allow for rapid expression in the cell.

[0106] In one embodiment, the AAV particles of the invention comprise the formula AAV-promoter-transgene. The AAV may be an ssAAV or a scAAV described herein or known in the art.

### Delivery to the CNS

[0107] Factors affecting delivery of payloads by parvovirus, e.g., AAV particles to cells of the central nervous system (e.g., parenchyma) as provided by the invention may comprise, but are not limited to, infusion parameters and devices, spatial orientation of the subject, composition physiochemical properties, and viral physiochemical and biochemical properties.

[0108] In one embodiment, delivery of payloads by adeno-associated virus (AAV) particles to cells of the central nervous system (e.g., parenchyma) comprises prolonged infusion into cerebrospinal fluid (CSF). CSF is produced by specialized ependymal cells that comprise the choroid plexus located in the ventricles of the brain. CSF produced within the brain then circulates and surrounds the central nervous system including the brain and spinal cord. CSF continually circulates around the central nervous system, including the ventricles of the brain and subarachnoid space that surrounds both the brain and spinal cord, while maintaining a homeostatic balance of production and reabsorption into the vascular system. The entire volume of CSF is replaced approximately four to six times per day or approximately once every four hours, though values for individuals may vary.

[0109] In one embodiment, the AAV particles may be delivered by a route to bypass the liver metabolism.

[0110] In one embodiment, the AAV particles may be delivered to reduce degradation of the AAV particles and/or degradation of the formulation in the blood.

[0111] In one embodiment, the AAV particles may be delivered to bypass anatomical blockages such as, but not limited to the blood brain barrier.

[0112] In one embodiment, the AAV particles may be formulated and delivered to a subject by a route which increases the speed of drug effect as compared to oral delivery.

[0113] In one embodiment, the AAV particles may be delivery by a method to provide uniform transduction of the spinal cord and dorsal root ganglion (DRG). As a non-limiting example, the AAV particles may be delivered using intrathecal infusion. The intrathecal infusion may be a bolus infusion or it may be a continuous infusion. As another non-limiting example, the AAV particles are delivered using continuous intrathecal infusion over a period of about 10 hours.

[0114] In one embodiment, the AAV particles may be delivered to a subject via a single route administration.

[0115] In one embodiment, the AAV particles may be delivered to a subject via a multi-site route of administration. For example, a subject may be administered the AAV particles at 2, 3, 4, 5 or more than 5 sites.

[0116] In one embodiment, the AAV particles may be formulated. As a non-limiting example the baricity and/or osmolarity of the formulation may be optimized to ensure optimal drug distribution in the central nervous system or a region or component of the central nervous system.

[0117] In one embodiment, a subject may be administered the AAV particles described herein using a catheter. The catheter may be placed in the lumbar region or the cervical region of a subject. As a non-limiting example, the catheter may be placed in the lumbar region of the subject. As another non-limiting example, the catheter may be placed in the cervical region of the subject. As yet another non-limiting example, the catheter may be placed in the high cervical region of the subject. As used herein, the “high cervical region” refers to the region of the spinal cord comprising the cervical vertebrae C1, C2, C3 and C4 or any subset thereof.

[0118] In one embodiment, a subject may be administered the AAV particles described herein using a bolus infusion. As used herein, a “bolus infusion” means a single and rapid infusion of a substance or composition.

[0119] In one embodiment, a subject may be administered the AAV particles described herein using sustained delivery over a period of minutes, hours or days. The infusion rate may be changed depending on the subject, distribution, formulation or another delivery parameter known to those in the art.

[0120] In one embodiment, the intracranial pressure may be evaluated prior to administration. The route, volume, AAV particle concentration, infusion duration and/or vector titer may be optimized based on the intracranial pressure of a subject.

[0121] In one embodiment, the AAV particles described herein may be delivered by a method which allows even distribution of the AAV particles along the CNS taking into account cerebrospinal fluid (CSF) dynamics. While not wishing to be bound by theory, CSF turnover (TO) occurs approximately 6 times/day or every 4 hours and thus continuous delivery of the AAV particles at a fixed rate, may lead to AAV particles which have distributed throughout the CNS.

[0122] In one embodiment, AAV particles are delivered taking into account the oscillating movement of the CSF around the spinal cord. Vortexes are formed by the oscillating movement of the CSF around the cord and these individual vortices combine to form vortex arrays. The arrays combine to form fluid paths for movement of the AAV particles along the spinal cord.

[0123] In one embodiment, the delivery method and duration is chosen to provide broad transduction in the spinal cord. As a non-limiting example, intrathecal delivery is used to provide broad transduction along the rostral-caudal length of the spinal cord. As another non-limiting example, multi-site infusions provide a more uniform transduction along the rostral-caudal length of the spinal cord. As yet another non-limiting example, prolonged infusions provide a more uniform transduction along the rostral-caudal length of the spinal cord.

[0124] In one embodiment, delivery of AAV particles comprising a viral genome encoding a payload described herein to sensory neurons in the dorsal root ganglion (DRG), ascending spinal cord sensory tracts, and cerebellum will lead to an increased expression of the encoded payload. The increased expression may lead to improved survival and function of various cell types.

[0125] In one embodiment, delivery of AAV particles comprising a nucleic acid sequence encoding frataxin to sensory neurons in the dorsal root ganglion (DRG), ascending spinal cord sensory tracts, and cerebellum leads to an increased expression of frataxin. The increased expression of frataxin then leads to improved survival, ataxia (balance) and gait, sensory capability, coordination of movement and strength, functional capacity and quality of life and/or improved function of various cell types.

[0126] In one embodiment, the AAV particles may be delivered by systemic delivery. As a non-limiting example, the systemic delivery may be by intravascular administration.

[0127] In one embodiment, the AAV particles may be delivered by injection into the CSF pathway. Non-limiting examples of delivery to the CSF pathway include intrathecal and intracerebroventricular administration.

[0128] In one embodiment, the AAV particles may be delivered by direct injection into the brain. As a non-limiting example, the brain delivery may be by intrastriatal administration.

### Intracerebroventricular (ICV) Infusion

[0129] In one embodiment, delivery of AAV particles to cells of the central nervous system (e.g., parenchyma) is performed by intracerebroventricular (ICV) prolonged infusion. ICV prolonged infusion comprises delivery by injection into the ventricular system of the brain. ICV prolonged infusion may comprise delivery to any of the ventricles of the brain, including, but not limited to, either of the two lateral ventricles left and right, third ventricle, and/or fourth ventricle. ICV prolonged infusion may comprise delivery to any of the foramina, or channels that connect the ventricles, including, but not limited to, interventricular foramina, also called the foramina of Monroe, cerebral aqueduct, and/or central canal. ICV prolonged infusion may comprise delivery to any of the apertures of the ventricular system including, but not limited to, the median aperture (aka foramen of Magendie), right lateral aperture, and/or left lateral aperture (aka foramina of Lushka). In one embodiment, ICV prolonged infusion comprises delivery to the perivascular space in the brain.

### Intrathecal (IT) Infusion

[0130] It has been discovered that prolonged continuous intrathecal (IT) infusion leads to stable AAV particle levels within the cerebral spinal fluid (CSF) circulating around the brain and spinal cord by maintaining favorable concentration gradients for AAV particle movement into the parenchyma. Prolonged IT infusion provides increased exposure that favors tissue interactions with AAV by extracellular and intraneuronal processes. In one embodiment extracellular ‘paravascular capture’ comprises the inward movement of AAV along blood vessels. In one embodiment, AAV may move along the outside of neural axons including, but not limited to, nerves such as the dorsal and ventral roots that transect the IT space and are bathed by CSF. Intraneuronal exposure comprises uptake and transport within and along the interior of axons towards (retrograde) or away from (anterograde) the neuronal cell body; AAV has been shown to move in both directions dependent on the serotype.

[0131] Stable levels of AAV particles and concentrations gradients induced by prolonged IT infusion increases the total area of spinal cord exposed to efficacious AAV particle concentrations. Consequently, prolonged exposure to the spinal cord will allow for a single site of delivery for widespread neuraxial transfection. As a non-limiting example, the even distribution across targeted neuraxis may avoid hot spots of transduction.

[0132] Prolonged IT infusion additionally allows for slower, more controlled infusion that yields more reproducible results. In contrast, bolus delivery can lead to wastage of AAV drug product and ‘hot spots’ comprising uneven, high levels of transduction along the spinal cord or adjacent dorsal root ganglion.

[0133] The large size of AAV particles, about 25 nm diameter, leads to steric hindrance wherein there is a limit to the number of AAV particles that may access tissue binding sites and achieve subsequent uptake into cells at any given point in time. Bolus delivery of high numbers of AAV particles over a short period of infusion makes it impossible for much of the delivered AAV dose to reach binding sites for uptake into neurons, astrocytes, oligodendrocytes, microglia and other CNS cells. In contrast, prolonged continuous IT infusion may provide more even and complete distribution of AAV along the neuraxis as AAV concentration reaches equilibrium, thereby reducing the risk of steric hindrance due to the large size of AAV as well as providing a longer timeframe for uptake of AAV into neural cells, tissues, and structures.

[0134] This extended timeframe allows for AAV levels in the spinal cord to approach steady state, i.e., the maximum possible level of particles in the CSF for a given infusion rate and concentration. Steady state for AAV levels is reached when the amount of AAV infused into the CSF is equal to AAV clearance rate. The longer that AAV is delivered at or near steady state, the longer there is maintained a favorable diffusion gradient from CSF into parenchyma, which maximizes the opportunity for particles to be transported via extra- and intra-neuronal routes.

[0135] While not wishing to be bound by theory, since CSF turnover (TO) occurs approximately 6 times/day or every 4 hours, the steady state described here which is dependent on continuous delivery of AAV at a fixed rate, would predict that AAV particles move and distribute based on CSF flow dynamics, and that overall binding of AAV to tissue is small compared to total AAV particle dose.

[0136] The present invention provides administration and/or delivery methods for vectors and viral particles, e.g., AAV particles or AAV, for the treatment or amelioration of diseases or disorders of the CNS. Such methods may involve the inhibition of gene expression, gene replacement or gene activation. Such outcomes are achieved by utilizing the infusion methods taught herein.

[0137] In one embodiment, delivery of AAV particles to cells of the central nervous system (e.g., parenchyma) is performed by intrathecal (IT) prolonged infusion. IT prolonged infusion comprises delivery by injection into the subarachnoid space, between the arachnoid membrane and pia mater, which comprises the channels through which CSF circulates. IT prolonged infusion comprises delivery to any area of the subarachnoid space including, but not limited to, perivascular space and the subarachnoid space along the entire length of the spinal cord and surrounding the brain.

### The Spinal Cord

[0138] The human spinal cord was first mapped by Bruce, 1901 (Bruce, A., 1901. A Topographical Atlas of the Spinal Cord. Williams and Norgate, London, Available from: www.archive.org/details/cu31924024791406 [24.07.14]) and later by others including Sengul et al., 2013 (Sengul, G., Watson, C., Tanaka, I., Paxinos, G., 2013. Atlas of the Spinal Cord of the Rat, Mouse, Marmoset, Rhesus, and Human. Elsevier Academic Press, San Diego), the contents of each of which is herein incorporated by reference in its entirety. The spinal cord can be divided into 5 regions, into an organization which is derived from the adjacent vertebrae: cervical, thoracic, lumbar, sacral, and coccygeal (caudal) as described in Watson et al., 2015 (Neuroscience Research 93 (2015) 164-175 The spinal cord of the common marmoset (Callithrix jacchus) Charles Watson, Gulgun Senguld, Ikuko Tanakae, Zoltan Rusznakb, and Hironobu Tokunoe), and Pardo et al., 2012 (Toxicologic Pathology, 40: 624-636, 2012 “Technical Guide for Nervous System Sampling of the Cynomolgus Monkey for General Toxicity Studies” Ingrid D. Pardo, Robert H. Garman, Klaus Weber, Walter F. Bobrowski, Jerry F. Hardisty, And Daniel Morton), the contents of each of which is herein incorporated by reference in its entirety. The segments in each region and their numbering are shown in Table 1.

[0139] In some instanced, rhesus and cynomolgus monkey each have the same number of segments in each region. Rhesus monkey and Cynomolgus monkeys have 7 or 8 segments in the cervical region. Humans have 7 or 8 segments in the cervical region. Humans, Rhesus monkeys and Cynomolgus monkeys have 12 thoracic segments. Humans have 5 lumbar segments while Rhesus and Cynomolgus monkeys have 7 lumbar segments. The sacral region includes 5 segments in humans, but three segments in Cynomolgus monkey and Rhesus monkey. The coccygeal region has 3 segments in rhesus monkey and cynomolgus monkey, and one segment in human.

TABLE 1
Spinal cord segments in human, cynomolgus and rhesus monkeys

| Spinal Cord | | Cynomolgus | Rhesus |
|---|---|---|---|
| Region | Human | Monkey | Monkey |
| Cervical | C1-C7 | C1-C7 | C1-C7 |
| Thoracic | T1-T12 | T1-T12 | T1-T12 |
| Lumbar | L1-L5 | L1-L7 | L1-L7 |
| Sacral | S1-S5 | S1-S3 | S1-S3 |
| Coccygeal | Co1 | Co1-3 | Co1-3 |
| (caudal) | | | |

[0140] Additionally, the spinal cord can also be divided into six regions anatomically and functionally (Sengul et al., 2013 (Sengul, G., Watson, C., Tanaka, I., Paxinos, G., 2013. Atlas of the Spinal Cord of the Rat, Mouse, Marmoset, Rhesus, and Human. Elsevier Academic Press, San Diego), and also Watson et al., Neuroscience Research 93:164-175 (2015)). These regions are the neck muscle region, the upper limb muscle region, the sympathetic outflow region, the lower limb muscle region, the parasympathetic outflow region, and the tail muscle region. These six regions also correlate with territories defined by gene expression during development (see, e.g., Watson et al., supra). The six regions can be defined histologically by the presence or absence of 2 features, the lateral motor column (LMC) and the preganglionic (intermediolateral) column (PGC) (Watson et al., 2015, incorporated herein by reference in its entirety). The limb enlargements are characterized by the presence of a lateral motor column (LMC) and the autonomic regions containing a preganglionic column (PGC). The neck (prebrachial) and tail (caudal) regions have neither an LMC nor a PGC. The limb enlargements and the sympathetic outflow region are marked by particular patterns of hox gene expression in the mouse and chicken, further supporting the division of the spinal cord into these functional regions. Table 2 maps the C, T, L, S and Co designations described in Table 1 to the functional regions according to Sengul et al. and Watson et al. and maps the functional equivalents for Human, Rhesus Monkey, and Japanese Monkey (another macaque). Note: 51 in Rhesus Monkey and L7 in Japanese monkey is located in both crural and postcrural regions.

TABLE 2
Spinal cord regions and sections by function

| Spinal Cord | | Rhesus | Japanese |
|---|---|---|---|
| Region | Human | Monkey | Monkey |
| Neck Muscle | C1-C4 (according | C1-C4 | C1-C3 (as |
| Region | to Bruce) | (according to | described in |
| (prebrachial | C1-C3 (according | Sengul et al.) | Watson et al.) |
| region) | to Sengul et al.) | | |
| Upper limb | C5-T1 (according | C5-T1 | C4-C8 (as |
| Region | to Bruce) | (according to | described in |
| (brachial | C4-T1 (according | Sengul et al.) | Watson et al.) |
| region) | to Sengul et al.) | | |
| Sympathetic | T2-L1 (according | T2-L3 | T1-L2 (as |
| outflow region | to Bruce) | (according to | described in |
| (postbrachial | T2-L1 (according | Sengul et al.) | Watson et al.) |
| region) | to Sengul et al.) | | |
| Lower limb | L2-S2 (according | L4-S1 | L3-L7 (as |
| muscle region | to Bruce) | (according to | described in |
| (crural region) | L3-S2 (according | Sengul et al.) | Watson et al.) |
| | to Sengul et al.) | | |
| Parasympathetic | S3-S4 (according | S1-S3 | L7-S3 (as |
| outflow region | to Bruce) | (according to | described in |
| (postcrural | S3-S5 (according | Sengul et al.) | Watson et al.) |
| region) | to Sengul et al.) | | |
| Tail muscle | S5-Co1 (according | Co1-Co3 | Co1-Co3 (as |
| region | to Bruce) | (according to | described in |
| (caudal region) | Co1 (according | Sengul et al.) | Watson et al.) |
| | to Sengul et al.) | | |

[0141] In one embodiment, the catheter for intrathecal delivery may be located in the cervical region. The AAV particles may be delivered in a continuous or bolus infusion.

[0142] In one embodiment, the catheter for intrathecal delivery may be located in the lumbar region. The AAV particles may be delivered in a continuous or bolus infusion.

[0143] In one embodiment, if continuous delivery of the AAV particles is used, the continuous infusion may be for 1 hour, 2, hours, 3 hours, 4 hours, 5 hours, 6 hours, 7 hours, 8 hours, 9 hours, 10 hours, 11 hours, 12 hours, 13 hours, 14 hours, 15 hours, 16 hours, 17 hours, 18 hours, 19 hours, 20 hours, 21 hours, 22 hours, 23 hours, 24 hours or more than 24 hours.

[0144] In one embodiment, the catheter may be in located at one site in the spine for delivery. As a non-limiting example, the location may be in the cervical or the lumbar region. The AAV particles may be delivered in a continuous or bolus infusion.

[0145] In one embodiment, the catheter may be located at more than one site in the spine for multi-site delivery. The AAV particles may be delivered in a continuous and/or bolus infusion. Each site of delivery may be a different dosing regimen or the same dosing regimen may be used for each site of delivery. As a non-limiting example, the sites of delivery may be in the cervical and the lumbar region. As another non-limiting example, the sites of delivery may be in the cervical region. As another non-limiting example, the sites of delivery may be in the lumbar region.

[0146] In one embodiment, a subject may be analyzed for spinal anatomy and pathology prior to delivery of the AAV particles described herein. As a non-limiting example, a subject with scoliosis may have a different dosing regimen and/or catheter location compared to a subject without scoliosis.

[0147] In one embodiment, the orientation of the spine subject during delivery of the AAV particles may be vertical to the ground.

[0148] In another embodiment, the orientation of the spine of the subject during delivery of the AAV particles may be horizontal to the ground.

[0149] In one embodiment, the spine of the subject may be at an angle as compared to the ground during the delivery of the AAV particles subject. The angle of the spine of the subject as compared to the ground may be at least 10, 20, 30, 40, 50, 60, 70, 80, 90, 100, 110, 120, 130, 140, 150 or 180 degrees.

[0150] In one embodiment, a subject may be delivered the AAV particles herein using two or more delivery routes. As a non-limiting example, the delivery routes may be intrathecal administration and intracerebroventricular administration.

[0151] In one embodiment, a subject may be delivered the AAV particles herein at more than one site. As a non-limiting example, the delivery may be a multi-site intrathecal delivery using a bolus injection.

[0152] In one embodiment, a subject may be delivered the AAV particles described herein by intrathecal delivery in the lumbar region via a 10 hour bolus injection.

[0153] In one embodiment, subjects such as mammals (e.g., non-human primates (NHPs)) are administered by intrathecal (IT) or intracerebroventricular (ICV) infusion the AAV particles described herein. The AAV particles may comprise scAAV or ssAAV, of any of the serotypes described herein, comprising a payload (e.g., a transgene). The dose may be 1×10¹³ to 3×10¹³ vg per subject. The subject may be administered a dose of the AAV particles over an extended period of time such as, but not limited to, 10 ml over 10 hours. The subjects may be evaluated 14-30 days (e.g., 14, 21, 28, or 30 days) after administration to determine the expression of the payload in the subject. Further, the subject may be evaluated prior to administration and after administration to determine changes in behavior and activity such as, but not limited to, tremors, lethargic behavior, motor deficits in limbs, strength, spinal reflex deficits, food consumption. (For AAV9 in Non Human Primates (Cyno) see: Samaranch et al. Human Gene Therapy 23:382-389 April 2012, Samaranch et al. Human Gene Therapy 24: 526-532 May 2013, Samaranch et al. Molecular Therapy 22(2) 329-337 February 2014, Gray et al. Gene Ther. 20(4) 450-459 April 2013; the contents of each of which are herein incorporated by reference in their entireties).

[0154] Cross-sections may be labeled according to vertebral segmentation numbering and/or spinal segment numbering. From the mid-thoracic region through the sacral region, the spinal cord is compressed relative to the vertebrae, resulting in a difference of vertebral and spinal levels.

[0155] In some embodiments IT prolonged infusion comprises delivery to the cervical, thoracic, and or lumbar regions of the spine. As used herein, IT prolonged infusion into the spine is defined by the vertebral level at the site of prolonged infusion. In some embodiments IT prolonged infusion comprises delivery to the cervical region of the spine at any location including, but not limited to C1, C2, C3, C4, C5, C6, C7, and/or C8. In some embodiments IT prolonged infusion comprises delivery to the thoracic region of the spine at any location including, but not limited to T1, T2, T3, T3, T4, T5, T6, T7, T8, T9, T10, T11, and/or T12. In some embodiments IT prolonged infusion comprises delivery to the lumbar region of the spine at any location including, but not limited to L1, L2, L3, L3, L4, L5, and/or L6. In some embodiments IT prolonged infusion comprises delivery to the sacral region of the spine at any location including, but not limited to S1, S2, S3, S4, or S5. In some embodiments, delivery by IT prolonged infusion comprises one or more than one site of prolonged infusion.

[0156] In some embodiments, delivery by IT prolonged infusion may comprise 1, 2, 3, 4, 5, 6, 7, 8, 9, 10, 11, 12, 13, 14, 15, 16, 17, 18, 19, 20, 21, 22, 23, 24, or 25 sites of prolonged infusion. In one embodiment, delivery by IT prolonged infusion comprises at least three sites of prolonged infusion. In one embodiment, delivery by IT prolonged infusion consists of three sites of prolonged infusion. In one embodiment, delivery by IT prolonged infusion comprises three sites of prolonged infusion at C1, T1, and L1.

[0157] In one embodiment, intrathecal administration delivers AAV particles to targeted regions of the CNS. Non-limiting examples of regions of the CNS to deliver AAV particles include dorsal root ganglion, dentate nucleus-cerebellum and the auditory pathway.

[0158] In one embodiment, intrathecal administration of AAV particles provides peripheral exposure which is as low as possible or a moderate level that is beneficial. As a non-limiting example, intrathecal administration of AAV particles shows almost no peripheral exposure to the liver. As another non-limiting example, intrathecal administration of AAV particles provides an expression level to the heart which treat and/or prevents cardiomyopathies. As yet another non-limiting example, intrathecal administration of AAV particles provides an expression level to the pancreas which treats and/or prevents diabetes.

### Infusion Parameters and Volume

[0159] In some embodiments, infusion volume, duration of infusion, infusion patterns and rates for delivery of AAV particles to cells of the central nervous system (e.g., parenchyma) may be determined and regulated. In one embodiment, delivery of AAV particles to cells of the central nervous system (e.g., parenchyma) comprises infusion of up to 1 mL. The infusion may be at least 0.1 mL, 0.2 mL, 0.3 mL, 0.4 mL, 0.5 mL, 0.6 mL, 0.7 mL, 0.8 mL, 0.9 mL, 1 mL or the infusion may be 0.1-0.2 mL, 0.1-0.3 mL, 0.1-0.4 mL, 0.1-0.5 mL, 0.1-0.6 mL, 0.1-0.7 mL, 0.1-0.8 mL, 0.1-0.9 mL, 0.1-1 mL, 0.2-0.3 mL, 0.2-0.4 mL, 0.2-0.5 mL, 0.2-0.6 mL, 0.2-0.7 mL, 0.2-0.8 mL, 0.2-0.9 mL, 0.2-1 mL, 0.3-0.4 mL, 0.3-0.5 mL, 0.3-0.6 mL, 0.3-0.7 mL, 0.3-0.8 mL, 0.3-0.9 mL, 0.3-1 mL, 0.4-0.5 mL, 0.4-0.6 mL, 0.4-0.7 mL, 0.4-0.8 mL, 0.4-0.9 mL, 0.4-1 mL, 0.5-0.6 mL, 0.5-0.7 mL, 0.5-0.8 mL, 0.5-0.9 mL, 0.5-1 mL, 0.6-0.7 mL, 0.6-0.8 mL, 0.6-0.9 mL, 0.6-1 mL, 0.7-0.8 mL, 0.7-0.9 mL, 0.7-1 mL, 0.8-0.9 mL, 0.8-1 mL, or 0.9-1 mL.

[0160] In one embodiment, delivery of AAV particles to cells of the central nervous system (e.g., parenchyma) comprises infusion of between about 1 mL to about 120 mL. The infusion may be 1-5 mL, 1-10 mL, 1-15 mL, 1-20 mL, 1-25 mL, 1-30 mL, 1-35 mL, 1-40 mL, 1-45 mL, 1-50 mL, 1-55 mL, 1-60 mL, 1-65 mL, 1-70 mL, 1-75 mL, 1-80 mL, 1-85 mL, 1-90 mL, 1-95 mL, 1-100 mL, 1-105 mL, 1-110 mL, 1-115 mL, 1-120 mL, 5-10 mL, 5-15 mL, 5-20 mL, 5-25 mL, 1-30 mL, 5-35 mL, 5-40 mL, 5-45 mL, 5-50 mL, 5-55 mL, 5-60 mL, 5-65 mL, 5-70 mL, 5-75 mL, 5-80 mL, 5-85 mL, 5-90 mL, 5-95 mL, 5-100 mL, 5-105 mL, 5-110 mL, 5-115 mL, 1-120 mL, 10-15 mL, 10-20 mL, 10-25 mL, 10-30 mL, 10-35 mL, 10-40 mL, 10-45 mL, 10-50 mL, 10-55 mL, 10-60 mL, 10-65 mL, 10-70 mL, 10-75 mL, 10-80 mL, 10-85 mL, 10-90 mL, 10-95 mL, 10-100 mL, 10-105 mL, 10-110 mL, 10-115 mL, 10-120 mL 15-20 mL, 15-25 mL, 15-30 mL, 15-35 mL, 15-40 mL, 15-45 mL, 15-50 mL, 15-55 mL, 15-60 mL, 15-65 mL, 15-70 mL, 15-75 mL, 15-80 mL, 15-85 mL, 15-90 mL, 15-95 mL, 15-100 mL, 15-105 mL, 15-110 mL, 15-115 mL, 15-120 mL, 20-25 mL, 20-30 mL, 20-35 mL, 20-40 mL, 20-45 mL, 20-50 mL, 20-55 mL, 20-60 mL, 20-65 mL, 20-70 mL, 20-75 mL, 20-80 mL, 20-85 mL, 20-90 mL, 20-95 mL, 20-100 mL, 20-105 mL, 20-110 mL, 20-115 mL, 20-120 mL, 25-30 mL, 25-35 mL, 25-40 mL, 25-45 mL, 25-50 mL, 25-55 mL, 25-60 mL, 25-65 mL, 25-70 mL, 25-75 mL, 25-80 mL, 25-85 mL, 25-90 mL, 25-95 mL, 25-100 mL, 25-105 mL, 25-110 mL, 25-115 mL, 25-120 mL, 30-35 mL, 30-40 mL, 30-45 mL, 30-50 mL, 30-55 mL, 30-60 mL, 30-65 mL, 30-70 mL, 30-75 mL, 30-80 mL, 30-85 mL, 30-90 mL, 30-95 mL, 30-100 mL, 30-105 mL, 30-110 mL, 30-115 mL, 30-120 mL, 35-40 mL, 35-45 mL, 35-50 mL, 35-55 mL, 35-60 mL, 35-65 mL, 35-70 mL, 35-75 mL, 35-80 mL, 35-85 mL, 35-90 mL, 35-95 mL, 35-100 mL, 35-105 mL, 35-110 mL, 35-115 mL, 35-120 mL, 40-45 mL, 40-50 mL, 40-55 mL, 40-60 mL, 40-65 mL, 40-70 mL, 40-75 mL, 40-80 mL, 40-85 mL, 40-90 mL, 40-95 mL, 40-100 mL, 40-105 mL, 40-110 mL, 40-115 mL, 40-120 mL, 45-50 mL, 45-55 mL, 45-60 mL, 45-65 mL, 45-70 mL, 45-75 mL, 45-80 mL, 45-85 mL, 45-90 mL, 45-95 mL, 45-100 mL, 45-105 mL, 45-110 mL, 45-115 mL, 45-120 mL, 50-55 mL, 50-60 mL, 50-65 mL, 50-70 mL, 50-75 mL, 50-80 mL, 50-85 mL, 50-90 mL, 50-95 mL, 50-100 mL, 50-105 mL, 50-110 mL, 50-115 mL, 50-120 mL, 55-60 mL, 55-65 mL, 55-70 mL, 55-75 mL, 55-80 mL, 55-85 mL, 55-90 mL, 55-95 mL, 55-100 mL, 55-105 mL, 55-110 mL, 55-115 mL, 55-120 mL, 60-65 mL, 60-70 mL, 60-75 mL, 60-80 mL, 60-85 mL, 60-90 mL, 60-95 mL, 60-100 mL, 60-105 mL, 60-110 mL, 60-115 mL, 60-120 mL, 65-70 mL, 65-75 mL, 65-80 mL, 65-85 mL, 65-90 mL, 65-95 mL, 65-100 mL, 65-105 mL, 65-110 mL, 65-115 mL, 65-120 mL, 70-75 mL, 70-80 mL, 70-85 mL, 70-90 mL, 70-95 mL, 70-100 mL, 70-105 mL, 70-110 mL, 70-115 mL, 70-120 mL, 75-80 mL, 75-85 mL, 75-90 mL, 75-95 mL, 75-100 mL, 75-105 mL, 75-110 mL, 75-115 mL, 75-120 mL, 80-85 mL, 80-90 mL, 80-95 mL, 80-100 mL, 80-105 mL, 80-110 mL, 80-115 mL, 80-120 mL, 85-90 mL, 85-95 mL, 85-100 mL, 85-105 mL, 85-110 mL, 85-115 mL, 85-120 mL, 90-95 mL, 90-100 mL, 90-105 mL, 90-110 mL, 90-115 mL, 90-120 mL, 95-100 mL, 95-105 mL, 95-110 mL, 95-115 mL, 95-120 mL, 100-105 mL, 100-110 mL, 100-115 mL, 100-120 mL, 105-110 mL, 105-115 mL, 105-120 mL, 110-115 mL, 110-120 mL, or 115-120 mL.

[0161] In one embodiment, delivery of AAV particles to cells of the central nervous system (e.g., parenchyma) may comprise an infusion of about 0.1, 1, 2, 3, 4, 5, 6, 7, 8, 9, 10, 11, 12, 13, 14, 15, 16, 17, 18, 19, 20, 21, 22, 23, 24, 25, 26, 27, 28, 29, 30, 31, 32, 33, 34, 35, 36, 37, 38, 39, 40, 41, 42, 43, 44, 45, 46, 47, 48, 49, 50, 51, 52, 53, 54, 55, 56, 57, 58, 59, 60, 61, 62, 63, 64, 65, 66, 67, 68, 69, 70, 71, 72, 73, 74, 75, 76, 77, 78, 79, 80, 81, 82, 83, 84, 85, 86, 87, 88, 89, 90, 91, 92, 93, 94, 95, 96, 97, 98, 99, 100, 101, 102, 103, 104, 105, 106, 107, 108, 109, 110, 111, 112, 113, 114, 115, 116, 117, 118, 119, or 120 mL. In one embodiment, delivery of AAV particles to cells of the central nervous system (e.g., parenchyma) comprises of infusion of 1 mL.

[0162] In one embodiment, delivery of AAV particles to cells of the central nervous system (e.g., parenchyma) comprises of infusion of at least 1 mL. In one embodiment, delivery of AAV particles to cells of the central nervous system (e.g., parenchyma) comprises infusion of at least 3 mL. In one embodiment, delivery of AAV particles to cells of the central nervous system (e.g., parenchyma) comprises of infusion of 3 mL. In one embodiment, delivery of AAV particles to cells of the central nervous system (e.g., parenchyma) comprises infusion of at least 10 mL. In one embodiment, delivery of AAV particles to cells of the central nervous system (e.g., parenchyma) consists of infusion of 10 mL.

[0163] In one embodiment, the serotype of the AAV particles described herein may depend on the desired distribution, transduction efficiency and cellular targeting required. As described by Sorrentino et al. (comprehensive map of CNS transduction by eight adeno-associated virus serotypes upon cerebrospinal fluid administration in pigs, Molecular Therapy accepted article preview online 7 Dec. 2015; doi:10.1038/mt.2015.212; the contents of which are herein incorporated by reference in its entirety), AAV serotypes provided different distributions, transduction efficiencies and cellular targeting. In order to provide the desired efficacy, the AAV serotype needs to be selected that best matches not only the cells to be targeted but also the desired transduction efficiency and distribution.

### Duration of Infusion: Bolus Infusion

[0164] In one embodiment, delivery of AAV particles to cells of the central nervous system (e.g., parenchyma) comprises infusion by bolus injection with a duration of less than 30 minutes. In one embodiment, infusion by bolus injection comprises injection with a duration of less than 20 minutes. In one embodiment, infusion by bolus injection comprises injection with a duration of less than 10 minutes. In one embodiment, infusion by bolus injection comprises injection with a duration of less than 10 seconds. In one embodiment, infusion by bolus injection comprises injection with a duration of between 10 seconds to 10 minutes. In one embodiment, infusion by bolus injection comprises injection with a duration of 10 minutes. In one embodiment, infusion by bolus injection consists of injection with a duration of 10 minutes.

[0165] In one embodiment, delivery of AAV particles to cells of the central nervous system (e.g., parenchyma) comprises infusion by at least one bolus injection. In one embodiment, delivery may comprise infusion by 1, 2, 3, 4, 5, 6, 7, 8, 9, or 10 bolus injections. In one embodiment, delivery may comprise infusion by at least three bolus injections. In one embodiment, delivery comprises infusion by three bolus injections. In one embodiment, delivery of AAV to cells of the central nervous system (e.g., parenchyma) consists of infusion by three bolus injections.

[0166] In one embodiment, delivery of AAV particles to cells of the central nervous system (e.g., parenchyma) comprising infusion of more than one bolus injection further comprises an interval of at least one hour between injections. In one embodiment, delivery of AAV particles to cells of the central nervous system (e.g., parenchyma) comprising infusion of more than one bolus injection may further comprise an interval of 1, 2, 3, 4, 5, 6, 7, 8, 9, 10, 11, 12, 13, 14, 15, 16, 17, 18, 19, 20, 21, 22, 23, 24, 30, 36, 42, 48, 54, 60, 66, 72, 78, 84, 90, 96, 108, or 120 hour(s) between injections. In one embodiment, delivery comprising infusion of more than one bolus injection further comprises an interval of one hour between injections. In one embodiment, delivery consists of infusion by three bolus injections at an interval of one hour.

[0167] In one embodiment, DRG and/or cortical brain expression may be higher with shorter, high concentration infusions.

### Prolonged Infusion

[0168] In one embodiment, delivery of AAV particles to cells of the central nervous system (e.g., parenchyma) comprises prolonged infusion of pharmaceutically acceptable composition comprising AAV particles over a duration of at least 10 minutes. In one embodiment, delivery comprises prolonged infusion over a duration of between 30 minutes and 60 minutes. In one embodiment, delivery may comprise prolonged infusion of over a duration of 0.17, 0.33, 0.5, 0.67, 0.83, 1, 2, 3, 4, 5, 6, 7, 8, 9, 10, 11, 12, 13, 14, 15, 16, 17, 18, 19, 20, 21, 22, 23, 24, 25, 26, 27, 28, 29, 30, 31, 32, 33, 34, 35, 36, 37, 38, 39, 40, 41, 42, 43, 44, 45, 46, 47, 48, 49, 50, 51, 52, 53, 54, 55, 56, 57, 58, 59, 60, 61, 62, 63, 64, 65, 66, 67, 68, 69, 70, 71, 72, 73, 74, 75, 76, 77, 78, 79, 80, 81, 82, 83, 84, 85, 86, 87, 88, 89, 90, 91, 92, 93, 94, 95, 96, 97, 98, 99, 100, 101, 102, 103, 104, 105, 106, 107, 108, 109, 110, 111, 112, 113, 114, 115, 116, 117, 118, 119, 120, 121, 122, 123, 124, or 125 hour(s). In one embodiment, delivery comprises prolonged infusion over a duration of one hour. In one embodiment, delivery of AAV particles to cells of the central nervous system (e.g., parenchyma) consists of prolonged infusion over a duration of one hour.

[0169] In one embodiment, delivery of AAV particles to cells of the central nervous system (e.g., parenchyma) comprises prolonged infusion over a duration of 10 hours. In one embodiment, delivery of AAV particles to cells of the central nervous system (e.g., parenchyma) consists of prolonged infusion over a duration of 10 hours. In one embodiment, prolonged infusion may yield more homogenous levels of protein expression across the spinal cord, as compared to bolus dosing at one or multiple sites. In one embodiment, dentate nucleus expression may increase with prolonged infusions.

### Single and Multiple Rounds of Dosing

[0170] In one embodiment, delivery of AAV particles to cells of the central nervous system (e.g., parenchyma) comprises prolonged infusion of at least one dose. In one embodiment, delivery comprises prolonged infusion of one dose. In one embodiment, delivery of AAV to cells of the central nervous system (e.g., parenchyma) may comprise prolonged infusion of 1, 2, 3, 4, 5, 6, 7, 8, 9, or 10 dose(s).

### Interval of Dosing

[0171] In one embodiment, delivery of AAV particles to cells of the central nervous system (e.g., parenchyma) comprising prolonged infusion of more than one dose further comprises an interval of at least one hour between doses. In one embodiment, delivery may comprise an interval of 1, 2, 3, 4, 5, 6, 7, 8, 9, 10, 11, 12, 13, 14, 15, 16, 17, 18, 19, 20, 21, 22, 23, 24, 30, 36, 42, 48, 54, 60, 66, 72, 78, 84, 90, 96, 108, or 120 hour(s) between doses. In one embodiment, delivery comprises an interval of 24 hours between doses. In one embodiment, delivery consists of three prolonged infusion doses at an interval of 24 hours.

### Infusion Patterns: Simple (Constant)

[0172] In one embodiment, delivery of AAV particles to cells of the central nervous system (e.g., parenchyma) may comprise a constant rate of prolonged infusion. As used herein, a “constant rate” is a rate that stays about the same during the prolonged infusion.

### Infusion Patterns: Ramped

[0173] In one embodiment, delivery of AAV particles to cells of the central nervous system (e.g., parenchyma) may comprise a ramped rate of prolonged infusion where the rate either increases or decreases over time. As a non-limiting example, the rate of prolonged infusion increases over time. As another non-limiting example, the rate of prolonged infusion decreases over time.

### Infusion Patterns: Complex

[0174] In one embodiment, delivery of AAV particles to cells of the central nervous system (e.g., parenchyma) may comprise a complex rate of prolonged infusion wherein the rate of prolonged infusion alternates between high and low rates of prolonged infusion over time.

### Prolonged Infusion Rate

[0175] In one embodiment, delivery of AAV particles to cells of the central nervous system (e.g., parenchyma) comprises a rate of delivery may be defined by [VG/hour=mL/hour*VG/mL] wherein VG is viral genomes, VG/mL is composition concentration, and mL/hour is rate of prolonged infusion. In accordance with the present invention, the

[0176] In one embodiment, delivery of AAV to cells of the central nervous system (e.g., parenchyma) may comprise a rate of prolonged infusion between about 0.1 mL/hour and about 25.0 mL/hour (or higher if CSF pressure does not increase to dangerous levels). In some embodiments, delivery may comprise a rate of prolonged infusion of about 0.1, 0.2, 0.3, 0.4, 0.5, 0.6, 0.7, 0.8, 0.9, 1.0, 1.1, 1.2, 1.3, 1.4, 1.5, 1.6, 1.7, 1.8, 1.9, 2.0, 2.1, 2.2, 2.3, 2.4, 2.5, 2.6, 2.7, 2.8, 2.9, 3.0, 3.1, 3.2, 3.3, 3.4, 3.5, 3.6, 3.7, 3.8, 3.9, 4.0, 4.1, 4.2, 4.3, 4.4, 4.5, 4.6, 4.7, 4.8, 4.9, 5.0, 5.1, 5.2, 5.3, 5.4, 5.5, 5.6, 5.7, 5.8, 5.9, 6.0, 6.1, 6.2, 6.3, 6.4, 6.5, 6.6, 6.7, 6.8, 6.9, 7.0, 7.1, 7.2, 7.3, 7.4, 7.5, 7.6, 7.7, 7.8, 7.9, 8.0, 8.1, 8.2, 8.3, 8.4, 8.5, 8.6, 8.7, 8.8, 8.9, 9.0, 9.1, 9.2, 9.3, 9.4, 9.5, 9.6, 9.7, 9.8, 9.9, 10.0, 10.1, 10.2, 10.3, 10.4, 10.5, 10.6, 10.7, 10.8, 10.9, 11.0, 11.1, 11.2, 11.3, 11.4, 11.5, 11.6, 11.7, 11.8, 11.9, 12.0, 12.1, 12.2, 12.3, 12.4, 12.5, 12.6, 12.7, 12.8, 12.9, 13.0, 13.1, 13.2, 13.3, 13.4, 13.5, 13.6, 13.7, 13.8, 13.9, 14.0, 14.1, 14.2, 14.3, 14.4, 14.5, 14.6, 14.7, 14.8, 14.9, 15.0, 15.1, 15.2, 15.3, 15.4, 15.5, 15.6, 15.7, 15.8, 15.9, 16.0, 16.1, 16.2, 16.3, 16.4, 16.5, 16.6, 16.7, 16.8, 16.9, 17.0, 17.1, 17.2, 17.3, 17.4, 17.5, 17.6, 17.7, 17.8, 17.9, 18.0, 18.1, 18.2, 18.3, 18.4, 18.5, 18.6, 18.7, 18.8, 18.9, 19.0, 19.1, 19.2, 19.3, 19.4, 19.5, 19.6, 19.7, 19.8, 19.9, 20.0, 20.1, 20.2, 20.3, 20.4, 20.5, 20.6, 20.7, 20.8, 20.9, 21.0, 21.1, 21.2, 21.3, 21.4, 21.5, 21.6, 21.7, 21.8, 21.9, 22.0, 22.1, 22.2, 22.3, 22.4, 22.5, 22.6, 22.7, 22.8, 22.9, 23.0, 23.1, 23.2, 23.3, 23.4, 23.5, 23.6, 23.7, 23.8, 23.9, 24.0, 24.1, 24.2, 24.3, 24.4, 24.5, 24.6, 24.7, 24.8, 24.9, or 25.0 mL/hour. In some embodiments, delivery may comprise a rate of prolonged infusion of about 10, 20 30, 40, or 50 mL/hr. In one embodiment, delivery of AAV particles to cells of the central nervous system (e.g., parenchyma) comprises a rate of prolonged infusion of 1.0 mL/hour. In one embodiment, delivery consists of a rate of prolonged infusion of 1.0 mL/hour. In one embodiment, delivery of AAV to cells of the central nervous system (e.g., parenchyma) comprises a rate of prolonged infusion of 1.5 mL/hour. In one embodiment, delivery of AAV particles to cells of the central nervous system (e.g., parenchyma) consists of a rate of prolonged infusion of 1.5 mL/hour.

### Prolonged Infusion Dosing: Total Dose

[0177] In one embodiment, delivery of AAV particles to cells of the central nervous system (e.g., parenchyma) comprises prolonged infusion of at least one dose, or two or more doses. The interval between doses may be at least one hour, or between 1 hour and 120 hours. In one embodiment, the total dose of viral genomes delivered to cells of the central nervous system (e.g., parenchyma) defined by the equation [Total Dose VG=VG/mL*mL*# of doses] wherein VG is viral genomes and VG/mL is viral genome concentration. In accordance with the present invention, the total dose may be between about 1×10⁶ VG and about 1×10¹⁶ VG.

### Infusion Compositions

[0178] In some embodiments, a composition comprising AAV particles delivered to cells of the central nervous system (e.g., parenchyma) may have a certain range of concentrations, pH, baricity (i.e. density of solution), osmolarity, temperature, and other physiochemical and biochemical properties that benefit the delivery of AAV particles to cells of the central nervous system (e.g., parenchyma).

[0179] In one embodiment, delivery of AAV particles to cells of the central nervous system (e.g., parenchyma) may comprise a total dose between about 1×10⁶ VG and about 1×10¹⁶ VG. In some embodiments, delivery may comprise a total dose of about 1×10⁶, 2×10⁶, 3×10⁶, 4×10⁶, 5×10⁶, 6×10⁶, 7×10⁶, 8×10⁶, 9×106, 1×10⁷, 2×10⁷, 3×10⁷, 4×10⁷, 5×10⁷, 6×10⁷, 7×10⁷ 8×10⁷, 9×10⁷, 1×10⁸, 2×10⁸, 3×10⁸, 4×10⁸, 5×10⁸, 6×10⁸, 7×10⁸, 8×10⁸, 9×10⁸, 1×10⁹, 1.9×10⁹, 2×10⁹, 3×10⁹, 4×10⁹, 5×10⁹, 6×10⁹, 7×10⁹, 8×10⁹, 9×10⁹, 1×10¹⁰, 2×10¹⁰, 3×10¹⁰, 4×10¹⁰, 5×10¹⁰, 6×10¹⁰, 7×10¹⁰, 8×10¹⁰, 9×10¹⁰, 1×10¹¹, 2×10¹¹, 2.5×10¹¹, 3×10¹¹, 4×10¹¹, 5×10¹¹, 6×10¹¹, 7×10¹¹, 8×10¹¹, 9×10¹¹, 1×10¹², 2×10¹², 3×10¹², 4×10¹², 5×10¹², 6×10¹², 7×10¹², 8×10¹², 9×10¹², 1×10¹³, 2×10¹³, 3×10¹³, 4×10¹³, 5×10¹³, 6×10¹³, 7×10¹³, 8×10¹³, 9×10¹³, 1×10¹⁴, 2×10¹⁴, 3×10¹⁴, 4×10¹⁴, 5×10¹⁴, 6×10¹⁴, 7×10¹⁴, 8×10¹⁴, 9×10¹⁴, 1×10¹⁵, 2×10¹⁵, 3×10¹⁵, 4×10¹⁵, 5×10¹⁵, 6×10¹⁵, 7×10¹⁵, 8×10¹⁵, 9×10¹⁵, or 1×10¹⁶ VG. As a non-limiting example, the total dose is 1×10¹³ VG. As another non-limiting example, the total dose is 3×10¹³ VG. As another non-limiting example, the total dose is 3.73×10¹⁰ VG. As another non-limiting example, the total dose is 1.9×10¹⁰ VG. As another non-limiting example, the total dose is 2.5×10¹¹ VG. As another non-limiting example, the total dose is 5×10¹¹ VG. As another non-limiting example, the total dose is 1×10¹² VG. As another non-limiting example, the total dose is 5×10¹² VG.

[0180] In one embodiment, delivery of AAV particles to cells of the central nervous system (e.g., parenchyma) comprises a total dose of 5×10¹⁰ VG. In one embodiment, delivery consists of a total dose of 5×10¹⁰ VG. In one embodiment, delivery comprises a total dose of 3×10¹³ VG. In one embodiment, delivery of AAV to cells of the central nervous system (e.g., parenchyma) consists of a total dose of 3×10¹³ VG.

### Pressure

[0181] In one embodiment, delivery of AAV particles to cells of the central nervous system (e.g., parenchyma) may comprise a rate of prolonged infusion wherein the rate of prolonged infusion exceeds the rate of CSF absorption. In some embodiments, CSF pressure may increase wherein the rate of delivery is greater than the rate of clearance. In one embodiment, increased CSF pressure may increase delivery of AAV particles to cells of the central nervous system (e.g., parenchyma of brain and spinal cord). In one embodiment, delivery of AAV to cells of the central nervous system (e.g., parenchyma) may comprise an increase in sustained CSF pressure between about 1% and about 25%. In some embodiments, delivery may comprise an increase in sustained CSF pressure of about 1%, 2%, 3%, 4%, 5%, 6%, 7%, 8%, 9%, 10%, 11%, 12%, 13%, 14%, 15%, 16%, 17%, 18%, 19%, 20%, 21%, 22%, 23%, 24%, or 25%.

[0182] Although the descriptions of pharmaceutical compositions, e.g., AAV comprising a payload to be delivered, provided herein are principally directed to pharmaceutical compositions which are suitable for administration to humans, it will be understood by the skilled artisan that such compositions are generally suitable for administration to any other animal, e.g., to non-human animals, e.g. non-human mammals. Modification of pharmaceutical compositions suitable for administration to humans in order to render the compositions suitable for administration to various animals is well understood, and the ordinarily skilled veterinary pharmacologist can design and/or perform such modification with merely ordinary, if any, experimentation. Subjects to which administration of the pharmaceutical compositions is contemplated include, but are not limited to, humans and/or other primates; mammals, including commercially relevant mammals such as cattle, pigs, horses, sheep, cats, dogs, mice, and/or rats; and/or birds, including commercially relevant birds such as poultry, chickens, ducks, geese, and/or turkeys.

[0183] In some embodiments, compositions are administered to humans, human patients or subjects. For the purposes of the present disclosure, the phrase “active ingredient” generally refers either to the viral particle carrying the payload or to the payload delivered by the viral particle as described herein.

[0184] Formulations of the AAV pharmaceutical compositions described herein may be prepared by any method known or hereafter developed in the art of pharmacology. In general, such preparatory methods include the step of bringing the active ingredient into association with an excipient and/or one or more other accessory ingredients, and then, if necessary and/or desirable, dividing, shaping and/or packaging the product into a desired single- or multi-dose unit.

[0185] Relative amounts of the active ingredient, the pharmaceutically acceptable excipient, and/or any additional ingredients in a pharmaceutical composition in accordance with the invention will vary, depending upon the identity, size, and/or condition of the subject treated and further depending upon the route by which the composition is to be administered.

### Prolonged Infusion Composition Concentration

[0186] In one embodiment, delivery of AAV particles to cells of the central nervous system (e.g., parenchyma) may comprise a composition concentration between about 1×10⁶ VG/mL and about 1×10¹⁶ VG/mL. In some embodiments, delivery may comprise a composition concentration of about 1×10⁶, 2×10⁶, 3×10⁶, 4×10⁶, 5×10⁶, 6×10⁶, 7×10⁶, 8×10⁶, 9×10⁶, 1×10⁷, 2×10⁷, 3×10⁷, 4×10⁷, 5×10⁷, 6×10⁷, 7×10⁷, 8×10⁷, 9×10⁷, 1×10⁸, 2×10⁸, 3×10⁸, 4×10⁸, 5×10⁸, 6×10⁸, 7×10⁸, 8×10⁸, 9×10⁸, 1×10⁹, 2×10⁹, 3×10⁹, 4×10⁹, 5×10⁹, 6×10⁹, 7×10⁹, 8×10⁹, 9×10⁹, 1×10¹⁰, 2×10¹⁰, 3×10¹⁰, 4×10¹⁰, 5×10¹⁰, 6×10¹⁰, 7×10¹⁰, 8×10¹⁰, 9×10¹⁰, 1×10¹¹, 2×10¹¹, 3×10¹¹, 4×10¹¹, 5×10¹¹, 6×10¹¹, 7×10¹¹, 8×10¹¹, 9×10¹¹, 1×10¹², 2×10¹², 3×10¹², 4×10¹², 5×10¹², 6×10¹², 7×10¹², 8×10¹², 9×10¹², 1×10¹³, 2×10¹³, 3×10¹³, 4×10¹³, 5×10°, 6×10¹³, 7×10¹³, 8×10¹³, 9×10¹³, 1×10¹⁴, 2×10¹⁴, 3×10¹⁴, 4×10¹⁴, 5×10¹⁴, 6×10¹⁴, 7×10¹⁴, 8×10¹⁴, 9×10¹⁴, 1×10¹⁵, 2×10¹⁵, 3×10¹⁵, 4×10¹⁵, 5×10¹⁵, 6×10¹⁵, 7×10¹⁵, 8×10¹⁵, 9×10¹⁵, or 1×10¹⁶ VG/mL. In one embodiment, delivery comprises a composition concentration of 1×10¹³ VG/mL. In one embodiment, delivery consists of a composition concentration of 1×10¹³ VG/mL. In one embodiment, delivery comprises a composition concentration of 3×10¹² VG/mL. In one embodiment, delivery consists of a composition concentration of 3×10¹² VG/mL.

### Composition pH

[0187] In one embodiment, delivery of AAV to cells of the central nervous system (e.g., parenchyma) comprises a buffered composition of between pH 4.5 and 8.0. In some embodiments, delivery may comprise a buffered composition of about pH 3.0, 3.1, 3.2, 3.3, 3.4, 3.5, 3.6, 3.7, 3.8, 3.9, 4.0, 4.1, 4.2, 4.3, 4.4, 4.5, 4.6, 4.7, 4.8, 4.9, 5.0, 5.1, 5.2, 5.3, 5.4, 5.5, 5.6, 5.7, 5.8, 5.9, 6.0, 6.1, 6.2, 6.3, 6.4, 6.5, 6.6, 6.7, 6.8, 6.9, 7.0, 7.1, 7.2, 7.3, 7.4, 7.5, 7.6, 7.7, 7.8, 7.9, or 8.0. In one embodiment, delivery comprises a buffered composition of pH 7.4, which is considered physiological pH. In one embodiment, delivery comprises a buffered composition of pH 7.0. In one embodiment, buffer strength, or ability to hold pH, is relatively very low allowing the infused composition to quickly adjust to the prevailing physiological pH of the CSF (˜pH7.4).

### Composition Baricity

[0188] It is known in the art that CSF comprises a baricity, or density of solution, of approximately 1 g/mL at 37° C. In one embodiment, delivery of AAV particles to cells of the central nervous system (e.g., parenchyma) comprises an isobaric composition wherein the baricity of the composition at 37° C. is approximately 1 g/mL. In one embodiment, delivery comprises a hypobaric composition wherein the baricity of the composition at 37° C. is less than 1 g/mL. In one embodiment, delivery comprises a hyperbaric composition wherein the baricity of the composition at 37° C. is greater than 1 g/mL. In one embodiment, delivery comprises a hyperbaric composition wherein the baricity of the composition at 37° C. is increased by addition of approximately 5% to 8% dextrose. In one embodiment, delivery comprises a hyperbaric composition wherein the baricity of the composition at 37° C. is increased by addition of 5.0%, 5.1%, 5.2%, 5.3%, 5.4%, 5.5%, 5.6%, 5.7%, 5.8%, 5.9%, 6.0%, 6.1%, 6.2%, 6.3%, 6.4%, 6.5%, 6.6%, 6.7%, 6.8%, 6.9%, 7.0%, 7.1%, 7.2%, 7.3%, 7.4%, 7.5%, 7.6%, 7.7%, 7.8%, 7.9%, or 8.0% dextrose.

### Composition Osmolarity

[0189] In one embodiment, delivery of AAV particles to cells of the central nervous system (e.g., parenchyma) comprises co-administration of intravenous agents that increase serum osmolarity. As used herein, “co-administered” means the administration of two or more components. Co-administration refers to the administration of two or more components simultaneously or with a time lapse between administration such as 1 second, 5 seconds, 10 seconds, 15 seconds, 30 seconds, 45 seconds, 1 minute, 2 minutes, 3 minutes, 4 minutes, 5 minutes, 6 minutes, 7 minutes, 8 minutes, 9 minutes, 10 minutes, 11 minutes, 12 minutes, 13 minutes, 14 minutes, 15 minutes, 16 minutes, 17 minutes, 18 minutes, 19 minutes, 20 minutes, 21 minutes, 22 minutes, 23 minutes, 24 minutes, 25 minutes, 26 minutes, 27 minutes, 28 minutes, 29 minutes, 30 minutes, 31 minutes, 32 minutes, 33 minutes, 34 minutes, 35 minutes, 36 minutes, 37 minutes, 38 minutes, 39 minutes, 40 minutes, 41 minutes, 42 minutes, 43 minutes, 44 minutes, 45 minutes, 46 minutes, 47 minutes, 48 minutes, 49 minutes, 50 minutes, 51 minutes, 52 minutes, 53 minutes, 54 minutes, 55 minutes, 56 minutes, 57 minutes, 58 minutes, 59 minutes, 1 hour, 1.5 hours, 2 hours, 2.5 hours, 3 hours, 4 hours, 5 hours, 6 hours, 7 hours, 8 hours, 9 hours, 10 hours, 11 hours, 12 hours, 13 hours, 14 hours, 15 hours, 16 hours, 17 hours, 18 hours, 19 hours, 20 hours, 21 hours, 22 hours, 23 hours, 1 day, 1.5 days, 2 days, or more than 3 days.

[0190] In one embodiment, delivery comprises co-administration of intravenous mannitol. In one embodiment, delivery comprises co-administration of approximately 0.25 to 1.0 g/kg intravenous mannitol. In one embodiment, delivery comprises co-administration of 0.25, 0.26, 0.27, 0.28, 0.29, 0.30, 0.31, 0.32, 0.33, 0.34, 0.35, 0.36, 0.37, 0.38, 0.39, 0.40, 0.41, 0.42, 0.43, 0.44, 0.45, 0.46, 0.47, 0.48, 0.49, 0.50, 0.51, 0.52, 0.53, 0.54, 0.55, 0.56, 0.57, 0.58, 0.59, 0.60, 0.61, 0.62, 0.63, 0.64, 0.65, 0.66, 0.67, 0.68, 0.69, 0.70, 0.71, 0.72, 0.73, 0.74, 0.75, 0.76, 0.77, 0.78, 0.79, 0.80, 0.81, 0.82, 0.83, 0.84, 0.85, 0.86, 0.87, 0.88, 0.89, 0.90, 0.91, 0.92, 0.93, 0.94, 0.95, 0.96, 0.97, 0.98, 0.99, 1.00 g/kg intravenous mannitol.

### Composition Temperature

[0191] In one embodiment, delivery of AAV particles to cells of the central nervous system (e.g., parenchyma) comprises a composition wherein the temperature of the composition is 37° C. In one embodiment, delivery comprises a composition wherein the temperature of the composition is between approximately 20° C. and 26° C. In one embodiment, delivery comprises a composition wherein the temperature of the composition is approximately 20.0° C., 20.1° C., 20.2° C., 20.3° C., 20.4° C., 20.5° C., 20.6° C., 20.7° C., 20.8° C., 20.9° C., 21.0° C., 21.1° C., 21.2° C., 21.3° C., 21.4° C., 21.5° C., 21.6° C., 21.7° C., 21.8° C., 21.9° C., 22.0° C., 22.1° C., 22.2° C., 22.3° C., 22.4° C., 22.5° C., 22.6° C., 22.7° C., 22.8° C., 22.9° C., 23.0° C., 23.1° C., 23.2° C., 23.3° C., 23.4° C., 23.5° C., 23.6° C., 23.7° C., 23.8° C., 23.9° C., 24.0° C., 24.1° C., 24.2° C., 24.3° C., 24.4° C., 24.5° C., 24.6° C., 24.7° C., 24.8° C., 24.9° C., 25.0° C., 25.1° C., 25.2° C., 25.3° C., 25.4° C., 25.5° C., 25.6° C., 25.7° C., 25.8° C., 25.9° C., or 26.0° C.

### Drug Physiochemical & Biochemical Properties

[0192] In one embodiment, delivery of parvovirus e.g., AAV particles to cells of the central nervous system (e.g., parenchyma) comprises a composition wherein the AAV capsid is hydrophilic. In one embodiment, delivery comprises a composition wherein the AAV capsid is lipophilic.

[0193] In one embodiment, delivery of AAV particles to cells of the central nervous system (e.g., parenchyma) comprises a composition wherein the AAV capsid targets a specific receptor. In one embodiment, delivery of AAV particles to cells of the central nervous system (e.g., parenchyma) comprises a composition wherein the AAV capsid further comprises a specific ligand.

[0194] In some embodiments, delivery of AAV particles to cells of the central nervous system (e.g., parenchyma) comprises a composition wherein the AAV capsid may be, but is not limited to, AAV1, AAV2, AAV3, AAV4, AAV5, AAV6, AAV7, AAV8, AAV9, AAV10, AAV11, AAV12, AAVrh8, AAVrh10, AAV-DJ, and/or AAV-DJ8.

[0195] In one embodiment, delivery of AAV particles to cells of the central nervous system (e.g., parenchyma) comprises a composition wherein the AAV further comprises a self-complementary (SC) genome. In one embodiment, delivery comprises a composition wherein the AAV further comprises a single stranded (SS) genome.

[0196] In one embodiment, a self-complementary (sc) vector may be used to yield higher expression than the corresponding single stranded vector.

[0197] In one embodiment, delivery of AAV particles to cells of the central nervous system (e.g., parenchyma) comprises a composition wherein the AAV genome further comprises a cell specific promoter region. In one embodiment, delivery comprises a composition wherein the AAV genome further comprises a ubiquitous promoter region.

### Spatial Orientation: Body Angle

[0198] In one embodiment, delivery of AAV particles to cells of the central nervous system (e.g., parenchyma) comprises administration to a horizontal subject. In one embodiment, delivery comprises administration to a vertical subject. In one embodiment, delivery comprises administration to a subject at an angle between approximately horizontal 0° to about vertical 90°. In one embodiment, delivery comprises administration to a subject at an angle of 0°, 1°, 2°, 3°, 4°, 5°, 6°, 7°, 8°, 9°, 10°, 11°, 12°, 13°, 14°, 15°, 16°, 17°, 18°, 19°, 20°, 21°, 22°, 23°, 24°, 25°, 26°, 27°, 28°, 29°, 30°, 31°, 32°, 33°, 34°, 35°, 36°, 37°, 38°, 39°, 40°, 41°, 42°, 43°, 44°, 45°, 46°, 47°, 48°, 49°, 50°, 51°, 52°, 53°, 54°, 55°, 56°, 57°, 58°, 59°, 60°, 61°, 62°, 63°, 64°, 65°, 66°, 67°, 68°, 69°, 70°, 71°, 72°, 73°, 74°, 75°, 76°, 77°, 78°, 79°, 80°, 81°, 82°, 83°, 84°, 85°, 86°, 87°, 88°, 89°, 90°.

### Spatial Orientation: Change in the Orientation/Slope of Subject Body Position Over Time

[0199] In one embodiment, delivery of AAV particles to cells of the central nervous system (e.g., parenchyma) comprises administration to a subject wherein the angle of the subject changes over time from horizontal to vertical head up or vertical head down. In one embodiment, delivery comprises administration to a subject wherein the angle of the subject changes over time from vertical to horizontal.

[0200] In one embodiment, delivery comprises administration to a subject wherein the angle of the subject changes over time in two planes from vertical to horizontal as well as rotation around the long axis of the body. In combination, any % angle of the body can be realized between horizontal to vertical and rotationally left or right.

### Delivery Devices

[0201] In some embodiments, delivery of AAV particles to cells of the central nervous system (e.g., parenchyma) comprises a prolonged infusion pump or device. In some embodiments, the device may be a pump or comprise a catheter for administration of compositions of the invention across the blood brain barrier. Such devices include but are not limited to a pressurized olfactory delivery device, iontophoresis devices, multi-layered microfluidic devices, and the like. Such devices may be portable or stationary. They may be implantable or externally tethered to the body or combinations thereof.

[0202] Devices for administration may be employed for delivery of AAV particles to cells of the central nervous system (e.g., parenchyma) according to the present invention according to single, multi- or split-dosing regimens taught herein.

[0203] Method and devices known in the art for multi-administration to cells, organs and tissues are contemplated for use in conjunction with the methods and compositions disclosed herein as embodiments of the present invention. These include, for example, those methods and devices having multiple needles, hybrid devices employing for example lumens or catheters as well as devices utilizing heat, electric current or radiation driven mechanisms.

[0204] In one embodiment, the AAV particles may be delivered using an infusion port described herein and/or one that is known in the art.

[0205] In one embodiment, the AAV particles may be delivered using an infusion pump and/or an infusion port. The infusion pump and/or the infusion port may be one described herein or one known in the art such as, but not limited to, SYNCHROMED® II by Medtronic. The infusion pump may be programmed at a fixed rate or a variable rate for controlled delivery. The stability of the AAV particles and formulations thereof as well as the leachable materials should be evaluated prior to use.

[0206] In one embodiment, the devices described herein to deliver to a subject the above-described AAV particles may also include a tip protection device (e.g., for catheters and/or stereotactic fixtures of microcatheters). Non-limiting examples of protection devices are described in US Patent Publication No. US20140371711 and International Patent Publication No. WO2014204954, the contents of each of which are herein incorporated by reference in their entireties. The tip protection device may include an elongate body having a central lumen extending longitudinally therethrough, the lumen being sized and configured to slidably receive a catheter, and a locking mechanism configured to selectively maintain the elongate body in a fixed longitudinal position relative to a catheter inserted through the central lumen.

[0207] In one embodiment, the AAV particles may be delivered to a subject using a convection-enhanced delivery device. Non-limiting examples of targeted delivery of drugs using convection are described in US Patent Publication Nos. US20100217228, US20130035574 and US20130035660 and International Patent Publication No. WO2013019830 and WO2008144585, the contents of each of which are herein incorporated by reference in their entireties. The convection-enhanced delivery device may be a microfluidic catheter device that may be suitable for targeted delivery of drugs via convection, including devices capable of multi-directional drug delivery, devices that control fluid pressure and velocity using the venturi effect, and devices that include conformable balloons. As a non-limiting example, the convention-enhanced delivery device uses the venturi effect for targeted delivery of drugs as described in US Patent Publication No. US20130035574, the contents of which are herein incorporation by reference in its entirety. As another non-limiting example, the convention-enhanced delivery device uses the conformable balloons for targeted delivery of drugs as described in US Patent Publication No. US20130035660, the contents of which are herein incorporation by reference in its entirety. As another non-limiting example, the convection enhanced delivery device may be a CED catheter from Medgenesis Therapeutix such as those described in International Patent Publication No. WO2008144585 and US Patent No. US20100217228, the contents of each of which are herein incorporated by reference in their entireties. As another non-limiting example, the AAV particles may be in a liposomal composition for convection enhanced delivery such as the liposomal compositions from Medgenesis Therapeutix described in International Patent Publication No. WO2010057317 and US Patent No. US20110274625, the contents of each of which are herein incorporated by reference in their entireties, which may comprise a molar ratio of DSPC:DSPG:CHOL of 7:2:1.

[0208] In one embodiment, the catheter may be a neuromodulation catheter. Non-limiting examples of neuromodulation catheters include those taught in US Patent Application No. US20150209104 and International Publication Nos. WO2015143372, WO2015113027, WO2014189794 and WO2014150989, the contents of each of which are herein incorporated by reference in their entireties.

[0209] In one embodiment, the AAV particles may be delivered using an injection device which has a basic form of a stiff tube with holes of a selectable size at selectable places along the tube. This is a device which may be customized depending on the subject or the fluid being delivered. As a non-limiting example, the injection device which comprises a stiff tube with holes of a selectable size and location may be any of the devices described in U.S. Pat. Nos. 6,464,662, 6,572,579 and International Patent Publication No. WO2002007809, the contents of each of which are herein incorporated by reference in their entireties.

[0210] In one embodiment, the AAV particles may be delivered to a subject who is using or who has used a treatment stimulator for brain diseases. Non-limiting examples include treatment stimulators from THERATAXIS™ and the treatment stimulators described in International Patent Publication No. WO2008144232, the contents of which are herein incorporated by reference in its entirety.

[0211] In one embodiment, the AAV particles may be delivered to a defined area using a medical device which comprises a sealing system proximal to the delivery end of the device. Non-limiting examples of medical device with can deliver AAV particles to a defined area includes U.S. Pat. No. 7,998,128, US Patent Application No. US20100030102 and International Patent Publication No. WO2007133776, the contents of each of which are herein incorporated by reference in their entireties.

[0212] In one embodiment, the AAV particle may be delivered over an extended period of time using an extended delivery device. Non-limiting examples of extended delivery devices are described in International Patent Publication Nos. WO2015017609 and WO2014100157, U.S. Pat. No. 8,992,458, and US Patent Publication Nos. US20150038949, US20150133887 and US20140171902, the contents of each of which are herein incorporated by reference in their entireties. As a non-limiting example, the devices used to deliver the AAV particles are CED devices with various features for reducing or preventing backflow as in International Patent Publication No. WO2015017609 and US Patent Publication No. US20150038949, the contents of each of which are herein incorporated by reference in their entireties. As another non-limiting example, the devices used to deliver the AAV particles are CED devices which include a bullet-shaped nose proximal to a distal fluid outlet where the bullet-shaped nose forms a good seal with surrounding tissue and helps reduce or prevent backflow of infused fluid as described in U.S. Pat. No. 8,992,458, US Patent Publication Nos. US20150133887 and US20140171902 and International Patent Publication No. WO2014100157, the contents of each of which are herein incorporated by reference by their entireties. As another non-limiting example, the catheter may be made using micro-electro-mechanical systems (MEMS) technology to reduce backflow as described by Brady et al. (Journal of Neuroscience Methods 229 (2014) 76-83), the contents of which are herein incorporated by reference in its entirety.

[0213] In one embodiment, the AAV particles may be delivered using an implantable delivery device. Non-limiting examples of implantable devices are described by and sold by Codman Neuro Sciences (Le Lode, CH). The implantable device may be an implantable pump such as, but not limited to, those described in U.S. Pat. Nos. 8,747,391, 7,931,642, 7,637,897, and 6,755,814 and US Patent Publication No. US20100069891, the contents of each of which are herein incorporated by reference in their entireties. The implantable device (e.g., a fluidic system) may have the flow rate accuracy of the device optimized by the methods described in U.S. Pat. Nos. 8,740,182 and 8,240,635, and US Patent Publication No. US20120283703, the contents of each of which are herein incorporated by reference in its entirety. As a non-limiting example, the duty cycle of the valve of a system may be optimized to achieve the desired flow rate. The implantable device may have an electrokinetic actuator for adjusting, controlling or programming fine titration of fluid flow through a valve mechanism without intermixing between the electrolyte and fluid. As a non-limiting example, the electrokinetic actuator may be any of those described in U.S. Pat. No. 8,231,563 and US Patent Publication No. US20120283703, the contents of which are herein incorporated by reference in its entirety. Fluids of an implantable infusion pump may be monitored using methods known in the art and those taught in U.S. Pat. No. 7,725,272, the contents of which are herein incorporated by reference in its entirety.

[0214] In one embodiment, the delivery of the AAV particles in a subject may be determined and/or predicted using the prediction methods described in International Patent Publication No. WO2001085230, the contents of which are herein incorporated by reference in its entirety.

[0215] In one embodiment, a subject may be imaged prior to, during and/or after administration of the AAV particles. The imaging method may be a method known in the art and/or described herein. As a non-limiting example, the imaging method which may be used to classify brain tissue includes the medical image processing method described in U.S. Pat. Nos. 7,848,543, 9,101,282 and EP Application No. EP1768041, the contents of each of which are herein incorporated by reference in their entireties. As yet another non-limiting example, the physiological states and the effects of treatment of a neurological disease in a subject may be tracked using the methods described in US Patent Publication No. US20090024181, the contents of which are herein incorporated by reference in its entirety.

[0216] In one embodiment, a device may be used to deliver the AAV particles where the device creates one or more channels, tunnels or grooves in tissue in order to increase hydraulic conductivity. These channels, tunnels or grooves will allow the AAV particles to flow and produce a predictable infusion pattern. Non-limiting examples of this device is described in U.S. Pat. No. 8,083,720, US Patent Application No. US20110106009, and International Publication No. WO2009151521, the contents of each of which are herein incorporated by reference in its entirety.

[0217] In one embodiment, the flow of a composition comprising the AAV particles may be controlled using acoustic waveform outside the target area. Non-limiting examples of devices, methods and controls for using sonic guidance to control molecules is described in US Patent Application No. US20120215157, U.S. Pat. No. 8,545,405, International Patent Publication Nos. WO2010096495 and WO2010080701, the contents of each of which are herein incorporated by reference in their entireties.

[0218] In one embodiment, the flow of a composition comprising the AAV particles may be modeled prior to administration using the methods and apparatus described in U.S. Pat. Nos. 6,549,803 and 8,406,850 and US Patent Application No. US20080292160, the content of each of which is incorporated by reference in their entireties. As a non-limiting example, the physiological parameters defining edema induced upon infusion of fluid from an intraparenchymally placed catheter may be estimated using the methods described in U.S. Pat. No. 8,406,850 and US Patent Application No. US20080292160, the contents of which is herein incorporated by reference in its entirety.

[0219] In one embodiment, a surgical alignment device may be used to deliver the AAV particles to a subject. The surgical alignment device may be a device described herein and/or is known in the art. As a non-limiting example, the surgical alignment device may be controlled remotely (i.e., robotic) such as the alignment devices described in U.S. Pat. Nos. 7,366,561 and 8,083,753, the contents of each of which is incorporated by reference in their entireties.

[0220] In one embodiment, an intraparenchymal (IPA) catheter from Alcyone may be used to deliver the AAV particles described herein.

[0221] In another embodiment, an intraparenchymal catheter from Atanse may be used to deliver the AAV particles described herein.

[0222] In one embodiment, the distribution of the AAV particles described herein may be evaluated using imaging technology from Therataxis and/or Brain Lab.

### Treatment and Pharmaceutical Compositions

### Formulation

[0223] The AAV particles of the invention can be formulated using one or more excipients to: (1) increase stability; (2) increase cell transfection or transduction; (3) permit the sustained or delayed release; (4) alter the biodistribution (e.g., target the viral particle to specific tissues or cell types); (5) increase the translation of encoded protein in vivo; (6) alter the release profile of encoded protein in vivo and/or (7) allow for regulatable expression of the payload.

[0224] Formulations of the present invention can include, without limitation, saline, liposomes, lipid nanoparticles, polymers, peptides, proteins, cells transfected with viral vectors (e.g., for transplantation into a subject) and combinations thereof.

[0225] Formulations of the pharmaceutical compositions described herein may be prepared by any method known or hereafter developed in the art of pharmacology. In general, such preparatory methods include the step of associating the active ingredient with an excipient and/or one or more other accessory ingredients.

[0226] In one embodiment, the AAV particles of the invention may be formulated in PBS with 0.001% of pluronic acid (F-68) at a pH of about 7.0.

[0227] A pharmaceutical composition in accordance with the present disclosure may be prepared, packaged, and/or sold in bulk, as a single unit dose, and/or as a plurality of single unit doses. As used herein, a “unit dose” refers to a discrete amount of the pharmaceutical composition comprising a predetermined amount of the active ingredient. The amount of the active ingredient is generally equal to the dosage of the active ingredient which would be administered to a subject and/or a convenient fraction of such a dosage such as, for example, one-half or one-third of such a dosage.

[0228] Relative amounts of the active ingredient (e.g. AAV particle), the pharmaceutically acceptable excipient, and/or any additional ingredients in a pharmaceutical composition in accordance with the present disclosure may vary, depending upon the identity, size, and/or condition of the subject being treated and further depending upon the route by which the composition is to be administered. For example, the composition may comprise between 0.1% and 99% (w/w) of the active ingredient. By way of example, the composition may comprise between 0.1% and 100%, e.g., between 0.5 and 50%, between 1-30%, between 5-80%, at least 80% (w/w) active ingredient.

[0229] In some embodiments, the AAV particle formulations described herein may contain a nucleic acid encoding at least one payload. As a non-limiting example, the formulations may contain a nucleic acid encoding 1, 2, 3, 4 or 5 payloads. In one embodiment the formulation may contain a nucleic acid encoding a payload construct encoding proteins selected from categories such as, but not limited to, human proteins, veterinary proteins, bacterial proteins, biological proteins, antibodies, immunogenic proteins, therapeutic peptides and proteins, secreted proteins, plasma membrane proteins, cytoplasmic and cytoskeletal proteins, intracellular membrane bound proteins, nuclear proteins, proteins associated with human disease and/or proteins associated with non-human diseases. In one embodiment, the formulation contains at least three payload constructs encoding proteins.

[0230] The formulations of the invention can include one or more excipients, each in an amount that together increases the stability of the AAV particle, increases cell transfection or transduction by the viral particle, increases the expression of viral particle encoded protein, and/or alters the release profile of AAV particle encoded proteins. In some embodiments, a pharmaceutically acceptable excipient may be at least 95%, at least 96%, at least 97%, at least 98%, at least 99%, or 100% pure. In some embodiments, an excipient is approved for use for humans and for veterinary use. In some embodiments, an excipient may be approved by United States Food and Drug Administration. In some embodiments, an excipient may be of pharmaceutical grade. In some embodiments, an excipient may meet the standards of the United States Pharmacopoeia (USP), the European Pharmacopoeia (EP), the British Pharmacopoeia, and/or the International Pharmacopoeia.

[0231] Excipients, which, as used herein, includes, but is not limited to, any and all solvents, dispersion media, diluents, or other liquid vehicles, dispersion or suspension aids, surface active agents, isotonic agents, thickening or emulsifying agents, preservatives, and the like, as suited to the particular dosage form desired. Various excipients for formulating pharmaceutical compositions and techniques for preparing the composition are known in the art (see Remington: The Science and Practice of Pharmacy, 21^{st} Edition, A. R. Gennaro, Lippincott, Williams & Wilkins, Baltimore, Md., 2006; incorporated herein by reference in its entirety). The use of a conventional excipient medium may be contemplated within the scope of the present disclosure, except insofar as any conventional excipient medium may be incompatible with a substance or its derivatives, such as by producing any undesirable biological effect or otherwise interacting in a deleterious manner with any other component(s) of the pharmaceutical composition.

### Inactive Ingredients

[0232] In some embodiments, AAV formulations may comprise at least one excipient which is an inactive ingredient. As used herein, the term “inactive ingredient” refers to one or more agents that do not contribute to the activity of the pharmaceutical composition included in formulations. In some embodiments, all, none or some of the inactive ingredients which may be used in the formulations of the present invention may be approved by the US Food and Drug Administration (FDA).

[0233] Formulations of AAV particles disclosed herein may include cations or anions. In one embodiment, the formulations include metal cations such as, but not limited to, Zn2+, Ca2+, Cu2+, Mg+ and combinations thereof.

### Administration

[0234] The AAV particles of the present invention may be administered by any route which results in a therapeutically effective outcome. These include, but are not limited to epidural, peridural, subdural (in particular delivery of AAV over one or more targeted regions of the neocortex), intracerebral (into the cerebrum), intracerebroventricular (into the cerebral ventricles), intrathecal (into the spinal canal or within the cerebrospinal fluid at any level of the cerebrospinal axis), intradiscal (within a disc), intradural (within or beneath the dura), intraspinal (within the vertebral column), caudal block, diagnostic, nerve block, or spinal. In specific embodiments, compositions may be administered in a way which allows them cross the blood-brain barrier, vascular barrier, or other epithelial barrier. In one embodiment, a formulation for a route of administration may include at least one inactive ingredient.

[0235] In one embodiment, the AAV particles may be delivered by systemic delivery. As a non-limiting example, the systemic delivery may be by intravascular administration.

[0236] In one embodiment, the AAV particles may be delivered by injection into the CSF pathway. Non-limiting examples of delivery to the CSF pathway include intrathecal and intracerebroventricular administration.

[0237] In one embodiment, the AAV particles may be delivered by direct injection into the brain. As a non-limiting example, the brain delivery may be by intrastriatal administration.

[0238] In one embodiment, the AAV particles may delivered to a subject using a device to deliver the AAV particles and a head fixation assembly. The head fixation assembly may be, but is not limited to, any of the head fixation assemblies sold by MRI interventions. As a non-limiting example, the head fixation assembly may be any of the assemblies described in U.S. Pat. Nos. 8,099,150, 8,548,569 and 9,031,636 and International Patent Publication Nos. WO201108495 and WO2014014585, the contents of each of which are incorporated by reference in their entireties. A head fixation assembly may be used in combination with an MRI compatible drill such as, but not limited to, the MRI compatible drills described in International Patent Publication No. WO2013181008 and US Patent Publication No. US20130325012, the contents of which are herein incorporated by reference in its entirety.

[0239] In one embodiment, the AAV particles may be delivered using a method, system and/or computer program for positioning apparatus to a target point on a subject to deliver the AAV particles. As a non-limiting example, the method, system and/or computer program may be the methods, systems and/or computer programs described in U.S. Pat. No. 8,340,743, the contents of which are herein incorporated by reference in its entirety. The method may include: determining a target point in the body and a reference point, wherein the target point and the reference point define a planned trajectory line (PTL) extending through each; determining a visualization plane, wherein the PTL intersects the visualization plane at a sighting point; mounting the guide device relative to the body to move with respect to the PTL, wherein the guide device does not intersect the visualization plane; determining a point of intersection (GPP) between the guide axis and the visualization plane; and aligning the GPP with the sighting point in the visualization plane.

[0240] In one embodiment, the AAV particles may be delivered using an MRI-guided device. Non-limiting examples of MRI-guided devices are described in U.S. Pat. Nos. 9,055,884, 9,042,958, 8,886,288, 8,768,433, 8,396,532, 8,369,930, 8,374,677 and 8,175,677 and US Patent Application No. US20140024927 the contents of each of which are herein incorporated by reference in their entireties. As a non-limiting example, the MRI-guided device may be able to provide data in real time such as those described in U.S. Pat. Nos. 8,886,288 and 8,768,433, the contents of each of which is herein incorporated by reference in its entirety. As another non-limiting example, the MRI-guided device or system may be used with a targeting cannula such as the systems described in U.S. Pat. Nos. 8,175,677 and 8,374,677, the contents of each of which are herein incorporated by reference in their entireties. As yet another non-limiting example, the MRI-guided device includes a trajectory guide frame for guiding an interventional device as described, for example, in U.S. Pat. No. 9,055,884 and US Patent Application No. US20140024927, the contents of each of which are herein incorporated by reference in their entireties.

[0241] In one embodiment the AAV particles may be delivered using an MRI-compatible tip assembly. Non-limiting examples of MRI-compatible tip assemblies are described in US Patent Publication No. US20140275980, the contents of which is herein incorporated by reference in its entirety.

[0242] In one embodiment, the AAV particles may be delivered using a cannula which is MRI-compatible. Non-limiting examples of MRI-compatible cannulas include those taught in International Patent Publication No. WO2011130107, the contents of which are herein incorporated by reference in its entirety.

[0243] In one embodiment, the AAV particles may be delivered using a catheter which is MRI-compatible. Non-limiting examples of MRI-compatible catheters include those taught in International Patent Publication No. WO2012116265, U.S. Pat. No. 8,825,133 and US Patent Publication No. US20140024909, the contents of each of which are herein incorporated by reference in their entireties.

[0244] In one embodiment, the AAV particles may be delivered using a device with an elongated tubular body and a diaphragm as described in US Patent Publication Nos. US20140276582 and US20140276614, the contents of each of which are herein incorporated by reference in their entireties.

[0245] In one embodiment, the AAV particles may be delivered using an MRI compatible localization and/or guidance system such as, but not limited to, those described in US Patent Publication Nos. US20150223905 and US20150230871, the contents of each of which are herein incorporated by reference in their entireties. As a non-limiting example, the MRI compatible localization and/or guidance systems may comprise a mount adapted for fixation to a patient, a targeting cannula with a lumen configured to attach to the mount so as to be able to controllably translate in at least three dimensions, and an elongate probe configured to snugly advance via slide and retract in the targeting cannula lumen, the elongate probe comprising at least one of a stimulation or recording electrode.

[0246] In one embodiment, the AAV particles may be delivered to a subject using a trajectory frame as described in US Patent Publication Nos. US20150031982 and US20140066750 and International Patent Publication Nos. WO2015057807 and WO2014039481, the contents of each of which are herein incorporated by reference in their entireties.

[0247] In one embodiment, the AAV particles may be delivered to a subject to improve and/or correct mitochondrial dysfunction.

[0248] In one embodiment, the AAV particles may be delivered to a subject to preserve neurons. The neurons may be primary and/or secondary sensor neurons.

[0249] In one embodiment, administration of the AAV particles may preserve and/or correct function in the sensory pathways.

[0250] In one embodiment, administration of the AAV particles may protect central pathways from degeneration. As a non-limiting example, the degeneration is later onset degeneration of auditory pathways.

### Dosing

[0251] The present invention provides methods of administering AAV particles in accordance with the invention to a subject in need thereof. AAV particle pharmaceutical, imaging, diagnostic, or prophylactic compositions thereof, may be administered to a subject using any amount and any route of administration effective for preventing, treating, diagnosing, or imaging a disease, disorder, and/or condition (e.g., a disease, disorder, and/or condition relating to working memory deficits). The exact amount required will vary from subject to subject, depending on the species, age, and general condition of the subject, the severity of the disease, the particular composition, its mode of administration, its mode of activity, and the like. Compositions in accordance with the invention are typically formulated in unit dosage form for ease of administration and uniformity of dosage. It will be understood, however, that the total daily usage of the compositions of the present invention may be decided by the attending physician within the scope of sound medical judgment. The specific therapeutically effective, prophylactically effective, or appropriate imaging dose level for any particular patient will depend upon a variety of factors including the disorder being treated and the severity of the disorder; the activity of the specific payload employed; the specific composition employed; the age, body weight, general health, sex and diet of the patient; the time of administration, route of administration, and rate of excretion of the specific payload employed; the duration of the treatment; drugs used in combination or coincidental with the specific payload employed; and like factors well known in the medical arts.

[0252] In certain embodiments, AAV particle pharmaceutical compositions in accordance with the present invention may be administered at dosage levels sufficient to deliver from about 0.0001 mg/kg to about 100 mg/kg, from about 0.001 mg/kg to about 0.05 mg/kg, from about 0.005 mg/kg to about 0.05 mg/kg, from about 0.001 mg/kg to about 0.005 mg/kg, from about 0.05 mg/kg to about 0.5 mg/kg, from about 0.01 mg/kg to about 50 mg/kg, from about 0.1 mg/kg to about 40 mg/kg, from about 0.5 mg/kg to about 30 mg/kg, from about 0.01 mg/kg to about 10 mg/kg, from about 0.1 mg/kg to about 10 mg/kg, or from about 1 mg/kg to about 25 mg/kg, of subject body weight per day, one or more times a day, to obtain the desired therapeutic, diagnostic, prophylactic, or imaging effect. It will be understood that the above dosing concentrations may be converted to vg or viral genomes per kg or into total viral genomes administered by one of skill in the art.

[0253] As used herein, a “single unit dose” is a dose of any therapeutic administered in one dose/at one time/single route/single point of contact, i.e., single administration event. As used herein, a “total daily dose” is an amount given or prescribed in 24 hour period. It may be administered as a single unit dose. The viral particles may be formulated in buffer only or in a formulation described herein.

[0254] In one embodiment, delivery of the AAV particles described herein results in minimal serious adverse events (SAEs) as a result of the delivery of the AAV particles.

[0255] In one embodiment, a subject has had a low incidence of mild to moderate adverse events (AEs) near the time of the administration of the AAV particles. The subject may have had a low incidence of mild to moderate AEs within minutes (e.g., 1, 5, 10, 15, 20, 25, 30, 35, 40, 45, 50, 55 or 60 minutes), hours (1, 2, 3, 4, 5, 6, 7, 8, 9, 10, 11, 12, 13, 14, 15, 16, 17, 18, 19, 20, 21, 22, 23, or 24 hours) or days (1, 2, 3, 4, 5, 6, 7, 8, 9, 10, 11, 12, 13, 14, 15, 16, 17, 18, 19, 20, 21, 22, 23, 24, 25, 26, 27, 28, 29 or 30 days).

[0256] In one embodiment, delivery of AAV particles to cells of the central nervous system (e.g., parenchyma) may comprise a total dose between about 1×10⁶ VG and about 1×10¹⁶ VG. In some embodiments, delivery may comprise a total dose of about 1×10⁶, 2×10⁶, 3×10⁶, 4×10⁶, 5×10⁶, 6×10⁶, 7×10⁶, 8×10⁶, 9×10⁶, 1×10⁷, 2×10⁷, 3×10⁷, 4×10⁷, 5×10⁷, 6×10⁷, 7×10⁷, 8×10⁷, 9×10⁷, 1×10⁸, 2×10⁸, 3×10⁸, 4×10⁸, 5×10⁸, 6×10⁸, 7×10⁸, 8×10⁸, 9×10⁸, 1×10⁹, 2×10⁹, 3×10⁹, 4×10⁹, 5×10⁹, 6×10⁹, 7×10⁹, 8×10⁹, 9×10⁹, 1×10¹⁰, 1.9×10¹⁰, 2×10¹⁰, 3×10¹⁰, 3.73×10¹⁰, 4×10¹⁰, 5×10¹⁰, 6×10¹⁰, 7×10¹⁰, 8×10¹⁰, 9×10¹⁰, 1×10¹¹, 2×10¹¹, 2.5×10¹¹, 3×10¹¹, 4×10¹¹, 5×10¹¹, 6×10¹¹, 7×10¹¹, 8×10¹¹, 9×10¹¹, 1×10¹², 2×10¹², 3×10¹², 4×10¹², 5×10¹², 6×10¹², 7×10¹², 8×10¹², 9×10¹², 1×10¹³, 2×10¹³, 3×10¹³, 4×10¹³, 5×10¹³, 6×10¹³, 7×10¹³, 8×10¹³, 9×10¹³, 1×10¹⁴, 2×10¹⁴, 3×10¹⁴, 4×10¹⁴, 5×10¹⁴, 6×10¹⁴, 7×10¹⁴, 8×10¹⁴, 9×10¹⁴, 1×10¹⁵, 2×10¹⁵, 3×10¹⁵, 4×10¹⁵, 5×10¹⁵, 6×10¹⁵, 7×10¹⁵, 8×10¹⁵, 9×10¹⁵, or 1×10¹⁶ VG. As a non-limiting example, the total dose is 1×10¹³VG. As another non-limiting example, the total dose is 3×10¹³VG. As another non-limiting example, the total dose is 3.73×10¹⁰ VG. As another non-limiting example, the total dose is 1.9×10¹⁰ VG. As another non-limiting example, the total dose is 2.5×10¹¹ VG. As another non-limiting example, the total dose is 5×10¹¹ VG. As another non-limiting example, the total dose is 1×10¹² VG. As another non-limiting example, the total dose is 5×10¹² VG.

[0257] In one embodiment, delivery of AAV particles to cells of the central nervous system (e.g., parenchyma) may comprise a composition concentration between about 1×10⁶ VG/mL and about 1×10¹⁶ VG/mL. In some embodiments, delivery may comprise a composition concentration of about 1×10⁶, 2×10⁶, 3×10⁶, 4×10⁶, 5×10⁶, 6×10⁶, 7×10⁶, 8×10⁶, 9×10⁶, 1×10⁷, 2×10⁷, 3×10⁷, 4×10⁷, 5×10⁷, 6×10⁷, 7×10⁷, 8×10⁷, 9×10⁷, 1×10⁸, 2×10⁸, 3×10⁸, 4×10⁸, 5×10⁸, 6×10⁸, 7×10⁸, 8×10⁸, 9×10⁸, 1×10⁹, 2×10⁹, 3×10⁹, 4×10⁹, 5×10⁹, 6×10⁹, 7×10⁹, 8×10⁹, 9×10⁹, 1×10¹⁰, 2×10¹⁰, 3×10¹⁰, 4×10¹⁰, 5×10¹⁰, 6×10¹⁰, 7×10¹⁰, 8×10¹⁰, 9×10¹⁰, 1×10¹¹, 2×10¹¹, 3×10¹¹, 4×10¹¹, 5×10¹¹, 6×10¹¹, 7×10¹¹, 8×10¹¹, 9×10¹¹, 1×10¹², 2×10¹², 3×10¹² 4×10¹², 5×10¹², 6×10¹², 7×10¹², 8×10¹², 9×10¹², 1×10¹³, 2×10¹³, 3×10¹³, 4×10¹³, 5×10¹³ 6×10¹³, 7×10¹³, 8×10¹³, 9×10¹³, 1×10¹⁴, 2×10¹⁴, 3×10¹⁴, 4×10¹⁴, 5×10¹⁴, 6×10¹⁴, 7×10¹⁴ 8×10¹⁴, 9×10¹⁴, 1×10¹⁵, 2×10¹⁵, 3×10¹⁵, 4×10¹⁵, 5×10¹⁵, 6×10¹⁵, 7×10¹⁵, 8×10¹⁵, 9×10¹⁵ or 1×10¹⁶ VG/mL. In one embodiment, the delivery comprises a composition concentration of 1×10¹³ VG/mL. In one embodiment, the delivery comprises a composition concentration of 3×10¹² VG/mL.

[0258] In one embodiment, delivery of AAV particles to cells of the central nervous system (e.g., parenchyma) may comprise a composition concentration between about 1×10⁶ VG/uL and about 1×10¹⁶ VG/uL. In some embodiments, delivery may comprise a composition concentration of about 1×10⁶, 2×10⁶, 3×10⁶, 4×10⁶, 5×10⁶, 6×10⁶, 7×10⁶, 8×10⁶, 9×10⁶, 1×10⁷, 2×10⁷, 3×10⁷, 4×10⁷, 5×10⁷, 6×10⁷, 7×10⁷, 8×10⁷, 9×10⁷, 1×10⁸, 2×10⁸, 3×10⁸, 4×10⁸, 5×10⁸, 6×10⁸, 7×10⁸, 8×10⁸, 9×10⁸, 1×10⁹, 2×10⁹, 3×10⁹, 4×10⁹, 5×10⁹, 6×10⁹, 7×10⁹, 8×10⁹, 9×10⁹, 1×10¹⁰, 2×10¹⁰, 3×10¹⁰, 4×10¹⁰, 5×10¹⁰, 6×10¹⁰, 7×10¹⁰, 8×10¹⁰, 9×10¹⁰, 1×10¹¹, 2×10¹¹, 3×10¹¹, 4×10¹¹, 5×10¹¹, 6×10¹¹, 7×10¹¹, 8×10¹¹, 9×10¹¹, 1×10¹², 2×10¹², 3×10¹² 4×10¹², 5×10¹², 6×10¹², 7×10¹², 8×10¹², 9×10¹², 1×10¹³, 2×10¹³, 3×10¹³, 4×10¹³, 5×10¹³ 6×10¹³, 7×10¹³, 8×10¹³, 9×10¹³, 1×10¹⁴, 2×10¹⁴, 3×10¹⁴, 4×10¹⁴, 5×10¹⁴, 6×10¹⁴, 7×10¹⁴ 8×10¹⁴, 9×10¹⁴, 1×10¹⁵, 2×10¹⁵, 3×10¹⁵, 4×10¹⁵, 5×10¹⁵, 6×10¹⁵, 7×10¹⁵, 8×10¹⁵, 9×10¹⁵ or 1×10¹⁶ VG/uL. In one embodiment, the delivery comprises a composition concentration of 1×10¹³ VG/uL. In one embodiment, the delivery comprises a composition concentration of 3×10¹² VG/uL. In one embodiment, the delivery comprises a composition concentration of 1.9×10¹⁰ VG/10 uL. In one embodiment, the delivery comprises a composition concentration of 2.5×10¹¹ VG/100 uL. In one embodiment, the delivery comprises a composition concentration of 5×10¹¹ VG/100 uL.

[0259] In one embodiment, the dosage delivered to a subject may take into account the amount of backflow of the substance. As a non-limiting example, the method for determining the backflow of a substance or fluid along a track of a delivery device is described in U.S. Pat. Nos. 7,742,630, 7,715,902 and European Publication No. EP1788498, the contents of each of which is herein incorporated by reference in their entireties. As a non-limiting example, a method of reducing the amount of backflow which is described in US Patent Publication No. US20140243783, the contents of which are herein incorporated by reference in its entirety, may be used to reduce the backflow from the administration of composition comprising AAV particles described herein.

### Combinations

[0260] The AAV particles may be used in combination with one or more other therapeutic, prophylactic, diagnostic, or imaging agents. By “in combination with,” it is not intended to imply that the agents must be administered at the same time and/or formulated for delivery together, although these methods of delivery are within the scope of the present disclosure. Compositions can be administered concurrently with, prior to, or subsequent to, one or more other desired therapeutics or medical procedures. In general, each agent will be administered at a dose and/or on a time schedule determined for that agent. In some embodiments, the present disclosure encompasses the delivery of pharmaceutical, prophylactic, diagnostic, or imaging compositions in combination with agents that may improve their bioavailability, reduce and/or modify their metabolism, inhibit their excretion, and/or modify their distribution within the body.

[0261] In one embodiment, the AAV particles may be delivered via intracerebroventricular (ICV) and/or intrathecal (IT) infusion and therapeutic agent may also be delivered to a subject via intravascular limb infusion in order to deliver the therapeutic agent to the skeletal muscle. Delivery of adeno-associate virus by intravascular limb infusion is described by Gruntman and Flotte (Human Gene Therapy Clinical Development, Vol. 26(3), 2015 159-164; the contents of which is herein incorporated by reference in its entirety).

### Delivery to Cells

[0262] The present disclosure provides a method of delivering to a cell or tissue any of the above-described AAV particle, comprising contacting the cell or tissue with said AAV particle or contacting the cell or tissue with a particle comprising said AAV particle, or contacting the cell or tissue with any of the described compositions, including pharmaceutical compositions. The method of delivering the AAV particle to a cell or tissue can be accomplished in vitro, ex vivo, or in vivo.

### Delivery to Subjects

[0263] The present disclosure additionally provides a method of delivering to a subject, including a mammalian subject, any of the above-described AAV particle comprising administering to the subject said AAV particle, or administering to the subject a particle comprising said AAV particle, or administering to the subject any of the described compositions, including pharmaceutical compositions.

### Measurement of Expression

[0264] Expression of payloads from viral genomes may be determined using various methods known in the art such as, but not limited to immunochemistry (e.g., IHC) or in situ hybridization (ISH). In one embodiment, transgenes delivered in different AAV capsids may have different expression levels in Dorsal Root Ganglion (DRG).

### CNS Diseases

[0265] The present disclosure provides a method for treating a disease, disorder and/or condition in a mammalian subject, including a human subject, comprising administering to the subject any of the viral particles e.g., AAV, AAV particle or AAV genomes described herein (i.e., viral genomes or “VG”) or administering to the subject a particle comprising said AAV particle or AAV genome, or administering to the subject any of the described compositions, including pharmaceutical compositions. In one embodiment, the disease, disorder and/or condition is a neurological disease, disorder and/or condition. The CNS diseases may be diseases that affect any component of the brain (including the cerebral hemispheres, diencephalon, brain stem, and cerebellum) or the spinal cord.

[0266] In some embodiments, AAV particles of the present invention, through delivery of a function payload that is a therapeutic product that can modulate the level or function of a gene product in the CNS, may be used to treat a neurodegenerative diseases and/or diseases or disorders that are characteristic with neurodegeneration, neuromuscular diseases, lysosomal diseases, trauma, bone marrow injuries, pain (including neuropathic pain), cancers of the nervous system, demyelinating diseases, autoimmune diseases of the nervous system, neurotoxic syndromes, sleeping disorders genetic brain disorders and developmental CNS disorders. A functional payload may alleviate or reduce symptoms that result from abnormal level and/or function of a gene product (e.g., an absence or defect in a protein) in a subject in need thereof or that otherwise confers a benefit to a CNS disorder in a subject in need thereof.

[0267] As non-limiting examples, therapeutic products delivered by AAV particles of the present invention may include, but are not limited to, growth and trophic factors, cytokines, hormones, neurotransmitters, enzymes, anti-apoptotic factors, angiogenic factors, and any protein known to be mutated in pathological disorders such as the “survival of motor neuron” protein (SMN); antisense RNA or RNAi targeting messenger RNAs coding for proteins having a therapeutic interest in any of CNS diseases discussed herein; or microRNAs that function in gene silencing and post-transcriptionally regulation of gene expression in the CNS (e.g., brain specific Mir-128a, See Adlakha and Saini, Molecular cancer, 2014, 13:33).

[0268] The growth and trophic factors may include, but are not limited to brain-derived growth factor (BDNF), epidermal growth factor (EGF), basic Fibroblast growth factor (bFGF), Ciliary neurotrophic factor (CNTF), corticotropin-releasing factor (CRF), Glial cell line derived growth factor (GDNF), Insulin-like growth factor-1 (IGF-1), nerve growth factor (NGF), neurotrophin-3 (NT-3), neurotrophin-4 (NT-4), and vascular endothelial growth factor (VEGF). Cytokines may include interleukin-10 (IL-10), interleukin-6, Interleukin-8, chemokine CXCL12 (SDF-1), TGF-beta, and Growth and differentiation factor (GDF-1/10).

[0269] In some embodiments, the neurological disorders may be neurodegenerative disorders including, but not limited to, Alzheimer's Diseases (AD); Amyotrophic lateral sclerosis (ALS); Creutzfeldt-Jakob Disease; Huntingtin's disease (HD); Friedreich's ataxia (FA); Parkinson Disease (PD); Multiple System Atrophy (MSA); Spinal Muscular Atrophy (SMA), Multiple Sclerosis (MS); Primary progressive aphasia; Progressive supranuclear palsy; Dementia; Brain Cancer, Degenerative Nerve Diseases, Encephalitis, Epilepsy, Genetic Brain Disorders that cause neurodegeneration, Retinitis pigmentosa (RP), Head and Brain Malformations, Hydrocephalus, Stroke, Prion disease, Infantile neuronal ceroid lipofuscinosis (INCL) (a neurodegenerative disease of children caused by a deficiency in the lysosomal enzyme palmitoyl protein thioesterase-1 (PPT1)), and others.

[0270] In some embodiments, AAV particles of the present invention may be used to treat diseases that are associated with impairments of the growth and development of the CNS, i.e., neurodevelopmental disorders. In some aspects, such neurodevelopmental disorders may be caused by genetic mutations, including but not limited to, Fragile X syndrome (caused by mutations in FMR1 gene), Down syndrome (caused by trisomy of chromosome 21), Rett syndrome, Williams syndrome, Angelman syndrome, Smith-Magenis syndrome, ATR-X syndrome, Barth syndrome, Immune dysfunction and/or infectious diseases during infancy such as Sydenham's chorea, Schizophrenia Congenital toxoplasmosis, Congenital rubella syndrome, Metabolic disorders such as diabetes mellitus and phenylketonuria; nutritional defects and/or brain trauma, Autism and autism spectrum.

[0271] In some embodiments, AAV particles of the present invention, may be used to treat a tumor in the CNS, including but not limited to, acoustic neuroma, Astrocytoma (Grades I, II, III and IV), Chordoma, CNS Lymphoma, Craniopharyngioma, Gliomas (e.g., brain stem glioma, ependymoma, optical nerve glioma, subependymoma), Medulloblastoma, Meningioma, Metastatic brain tumors, Oligodendroglioma, Pituitary Tumors, Primitive neuroectodermal (PNET), and Schwannoma.

[0272] In some embodiments, the neurological disorders may be functional neurological disorders with motor and/or sensory symptoms which have neurological origin in the CNS. As non-limiting examples, functional neurological disorders may be chronic pain, seizures, speech problems, involuntary movements, and sleep disturbances.

[0273] In some embodiments, the neurological disorders may be white matter disorders (a group of diseases that affects nerve fibers in the CNS) including but not limited to, Pelizaeus-Merzbacher disease, Hypomyelination with atrophy of basal ganglia and cerebellum, Aicardi-Goutières syndrome, Megalencephalic leukoencephalopathy with subcortical cysts, Congenital muscular dystrophies, Myotonic dystrophy, Wilson disease, Lowe syndrome, Sjögren-Larsson syndrome, PIBD or Tay syndrome, Cockayne's disease, erebrotendinous xanthomatosis, Zellweger syndrome, Neonatal adrenoleukodystrophy, Infantile Refsum disease, Zellweger-like syndrome, Pseudo-Zellweger syndrome, Pseudo-neonatal adrenoleukodystrophy, Bifunctional protein deficiency, X-linked adrenoleukodystrophy and adrenomyeloneuropathy and Refsum disease.

[0274] In some embodiments, the neurological disorders may be lysosomal storage disorders (LSDs) caused by the inability of cells in the CNS to break down metabolic end products, including but not limited to Niemann-Pick disease (a LSD resulting from inherited deficiency in acid sphingomyelinase (ASM); Metachromatic leukodystrophy (MLD) (a LSD characterized by accumulation of sulfatides in glial cells and neurons, the result of an inherited deficiency of arylsulfatase A (ARSA)); Globoid-cell leukodystrophy (GLD) (a LSD caused by mutations in galactosylceramidase); Fabry disease (a LSD caused by mutations in the alpha-galactosidase A (GLA) gene); Gaucher disease (caused by mutations in the beta-glucocerebrosidase (GBA) gene); GM1/GM2 gangliosidosis; Mucopolysaccharidoses disorder; Pompe disease; and Neuronal ceroid lipofuscinosis.

[0275] In one embodiment, the neurological disease, disorder and/or condition is Parkinson's disease. In one embodiment, the polynucleotide used to treat Parkinson's disease comprises any one of SEQ ID NOs 1-93 wherein the payload is replaced by AADC or any other payload known in the art for treating Parkinson's disease. As a non-limiting example, the payload may be a sequence such as NM_001082971.1 (GI: 132814447), NM_000790.3 (GI: 132814459), NM_001242886.1 (GI: 338968913), NM_001242887.1 (GI: 338968916), NM_001242888.1 (GI: 338968918), NM_001242889.1 (GI: 338968920), NM_001242890.1 (GI: 338968922) and fragment or variants thereof.

[0276] In another embodiment, the neurological disease, disorder and/or condition is Friedreich's Ataxia. In one embodiment, the delivery of the AAV particles may halt or slow the disease progression of Friedreich's Ataxia by 10%, 20%, 30%, 40%, 50%, 60%, 70%, 80%, 90%, 95% or more than 95% using a known analysis method and comparator group for Friedreich's Ataxia. As a non-limiting example, the delivery of the AAV particles may halt or slow progression of Friedreich's Ataxia progression as measured by mFARS/SARA by 50% relative to a comparator group. In one embodiment the polynucleotide used to treat Friedreich's Ataxia comprises any one of SEQ ID NOs 1-93 wherein the payload is replaced by Frataxin or any other payload known in the art for treating Friedreich's Ataxia. As a non-limiting example, the payload may be a sequence such as NM_000144.4 (GI: 239787167), NM_181425.2 (GI: 239787185), NM_001161706.1 (GI: 239787197) and fragment or variants thereof.

[0277] In another embodiment, the neurological disease, disorder and/or condition is Amyotrophic lateral sclerosis (ALS). In one embodiment, the delivery of the AAV particles may halt or slow the disease progression of ALS by 10%, 20%, 30%, 40%, 50%, 60%, 70%, 80%, 90%, 95% or more than 95% using a known analysis method and comparator group for ALS. In one embodiment the polynucleotide used to treat ALS comprises any one of SEQ ID NOs 1-93 wherein the payload is replaced by an shRNA, miRNA, siRNA, RNAi for SOD1 or any other payload known in the art for treating ALS.

[0278] In another embodiment, the neurological disease, disorder and/or condition is Huntington's disease. In one embodiment, the delivery of the AAV particles may halt or slow the disease progression of Huntington's disease by 10%, 20%, 30%, 40%, 50%, 60%, 70%, 80%, 90%, 95% or more than 95% using a known analysis method and comparator group for Huntington's disease. In one embodiment the polynucleotide used to treat Huntington's disease comprises any one of SEQ ID NOs 1-93 wherein the payload is replaced by an shRNA, miRNA, siRNA, RNAi for Htt or any other payload known in the art for treating Huntington's disease.

[0279] In another embodiment, the neurological disease, disorder or condition is spinal muscular atrophy (SMA). In one embodiment, the delivery of the AAV particles may halt or slow the disease progression of SMA by 10%, 20%, 30%, 40%, 50%, 60%, 70%, 80%, 90%, 95% or more than 95% using a known analysis method and comparator group for SMA. In one embodiment the polynucleotide used to treat SMA comprises any one of SEQ ID NOs 1-93 wherein the payload is replaced by SMN or any other payload known in the art for treating SMA. As a non-limiting example, the payload may be a sequence such as NM_001297715.1 (GI: 663070993), NM_000344.3 (GI: 196115055), NM_022874.2 (GI: 196115040) and fragment or variants thereof.

[0280] In one embodiment, the AAV particle encoding a payload may increase the amount of protein encoded by the transgene by 1%, 2%, 3%, 4%, 5%, 6%, 7%, 8%, 9%, 10%, 11%, 12%, 13%, 14%, 15%, 16%, 17%, 18%, 19%, 20%, 25%, 30%, 35%, 40%, 45%, 50%, 55%, 60%, 65%, 70%, 75%, 80%, 85%, 90%, 95%, 97%, 99% or more than 100%.

[0281] In one embodiment, the AAV particle encoding a payload may increase the amount of protein encoded by the transgene by 1-5%, 1-10%, 1-15%, 1-20%, 5-10%, 5-15%, 5-20%, 5-25%, 10-20%, 10-30%, 15-35%, 20-40%, 20-50%, 30-50%, 30-60%, 40-60%, 40-70%, 50-60%, 50-70%, 60-80%, 60-90%, 70-80%, 70-90%, 80-90%, 80-99% or 90-100%.

### Definitions

[0282] At various places in the present specification, substituents of compounds of the present disclosure are disclosed in groups or in ranges. It is specifically intended that the present disclosure include each and every individual sub-combination of the members of such groups and ranges. The following is a non-limiting list of term definitions.

[0283] Adeno-associated virus: The term “adeno-associated virus” or “AAV” as used herein refers to members of the dependovirus genus comprising any particle, sequence, gene, protein, or component derived therefrom. The term “AAV particle” as used herein comprises a capsid and a polynucleotide referred to as the AAV genome or viral genome (VG). The AAV particle may be derived from any serotype, described herein or known in the art, including combinations of serotypes (i.e., “pseudotyped” AAV) or from various genomes (e.g., single stranded or self-complementary). In addition, the AAV particle may be replication defective and/or targeted.

[0284] Activity: As used herein, the term “activity” refers to the condition in which things are happening or being done. Compositions of the invention may have activity and this activity may involve one or more biological events.

[0285] Administered in combination: As used herein, the term “administered in combination” or “combined administration” refers to simultaneous exposure to two or more agents (e.g., AAV) administered at the same time or within an interval such that the subject is at some point in time simultaneously exposed to both and/or such that there may be an overlap in the effect of each agent on the patient. In some embodiments, at least one dose of one or more agents is administered within about 24 hours, 12 hours, 6 hours, 3 hours, 1 hour, 30 minutes, 15 minutes, 10 minutes, 5 minutes, or 1 minute of at least one dose of one or more other agents. In some embodiments, administration occurs in overlapping dosage regimens. As used herein, the term “dosage regimen” refers to a plurality of doses spaced apart in time. Such doses may occur at regular intervals or may include one or more hiatus in administration. In some embodiments, the administration of individual doses of one or more compounds and/or compositions of the present invention, as described herein, are spaced sufficiently closely together such that a combinatorial (e.g., a synergistic) effect is achieved.

[0286] Amelioration: As used herein, the term “amelioration” or “ameliorating” refers to a lessening of severity of at least one indicator of a condition or disease. For example, in the context of neurodegeneration disorder, amelioration includes the reduction of neuron loss.

[0287] Animal: As used herein, the term “animal” refers to any member of the animal kingdom. In some embodiments, “animal” refers to humans at any stage of development. In some embodiments, “animal” refers to non-human animals at any stage of development. In certain embodiments, the non-human animal is a mammal (e.g., a rodent, a mouse, a rat, a rabbit, a monkey, a dog, a cat, a sheep, cattle, a primate, or a pig). In some embodiments, animals include, but are not limited to, mammals, birds, reptiles, amphibians, fish, and worms. In some embodiments, the animal is a transgenic animal, genetically-engineered animal, or a clone.

[0288] Antisense strand: As used herein, the term “the antisense strand” or “the first strand” or “the guide strand” of a siRNA molecule refers to a strand that is substantially complementary to a section of about 10-50 nucleotides, e.g., about 15-30, 16-25, 18-23 or 19-22 nucleotides of the mRNA of the gene targeted for silencing. The antisense strand or first strand has sequence sufficiently complementary to the desired target mRNA sequence to direct target-specific silencing, e.g., complementarity sufficient to trigger the destruction of the desired target mRNA by the RNAi machinery or process.

[0289] Approximately: As used herein, the term “approximately” or “about,” as applied to one or more values of interest, refers to a value that is similar to a stated reference value. In certain embodiments, the term “approximately” or “about” refers to a range of values that fall within 25%, 20%, 19%, 18%, 17%, 16%, 15%, 14%, 13%, 12%, 11%, 10%, 9%, 8%, 7%, 6%, 5%, 4%, 3%, 2%, 1%, or less in either direction (greater than or less than) of the stated reference value unless otherwise stated or otherwise evident from the context (except where such number would exceed 100% of a possible value).

[0290] Associated with: As used herein, the terms “associated with,” “conjugated,” “linked,” “attached,” and “tethered,” when used with respect to two or more moieties, mean that the moieties are physically associated or connected with one another, either directly or via one or more additional moieties that serve as linking agents, to form a structure that is sufficiently stable so that the moieties remain physically associated under the conditions in which the structure is used, e.g., physiological conditions. An “association” need not be strictly through direct covalent chemical bonding. It may also suggest ionic or hydrogen bonding or a hybridization based connectivity sufficiently stable such that the “associated” entities remain physically associated.

[0291] Biomolecule: As used herein, the term “biomolecule” is any natural molecule which is amino acid-based, nucleic acid-based, carbohydrate-based or lipid-based, and the like.

[0292] Biologically active: As used herein, the phrase “biologically active” refers to a characteristic of any substance (e.g., an AAV) that has activity in or on a biological system and/or organism. For instance, a substance that, when administered to an organism, has a biological effect on that organism, is considered to be biologically active. In particular embodiments, a compounds and/or compositions of the present invention may be considered biologically active if even a portion of is biologically active or mimics an activity considered to biologically relevant.

[0293] Biological system: As used herein, the term “biological system” refers to a group of organs, tissues, cells, intracellular components, proteins, nucleic acids, molecules (including, but not limited to biomolecules) that function together to perform a certain biological task within cellular membranes, cellular compartments, cells, tissues, organs, organ systems, multicellular organisms, or any biological entity. In some embodiments, biological systems are cell signaling pathways comprising intracellular and/or extracellular cell signaling biomolecules. In some embodiments, biological systems comprise growth factor signaling events within the extracellular/cellular matrix and/or cellular niches.

[0294] Central Nervous System or CNS: As used herein, “Central Nervous System” or “CNS” refers to one of the two major subdivisions of the nervous system, which in vertebrates includes of the brain and spinal cord. The central nervous system coordinates the activity of the entire nervous system.

[0295] Cervical Region: As used herein, “Cervical Region” refers to the region of the spinal cord comprising the cervical vertebrae C1, C2, C3, C4, C5, C6, C7, and C9.

[0296] CNS tissue: As used herein, “CNS tissue” or “CNS tissues” refers to the tissues of the central nervous system, which in vertebrates, include the brain and spinal cord and sub-structures thereof.

[0297] CNS structures: As used herein, “CNS structures” refers to structures of the central nervous system and sub-structures thereof. Non-limiting examples of structures in the spinal cord may include, ventral horn, dorsal horn, white matter, and nervous system pathways or nuclei within. Non limiting examples of structures in the brain include, forebrain, midbrain, hindbrain, diencephalon, telencephalon, myelencepphalon, metencephalon, mesencephalon, prosencephalon, rhombencephalon, cortices, frontal lobe, parietal lobe, temporal lobe, occipital lobe, cerebrum, thalamus, hypothalamus, tectum, tegmentum, cerebellum, pons, medulla, amygdala, hippocampus, basal ganglia, corpus callosum, pituitary gland, ventricles and sub-structures thereof.

[0298] CNS Cells: As used herein, “CNS Cells” refers to cells of the central nervous system and sub-structures thereof. Non-limiting examples of CNS cells include, neurons and sub-types thereof, glia, microglia, oligodendrocytes, ependymal cells and astrocytes. Non-limiting examples of neurons include sensory neurons, motor neurons, interneurons, unipolar cells, bipolar cells, multipolar cells, psuedounipolar cells, pyramidal cells, basket cells, stellate cells, purkinje cells, betz cells, amacrine cells, granule cell, ovoid cell, medium aspiny neurons and large aspiny neurons.

[0299] Complementary and substantially complementary: As used herein, the term “complementary” refers to the ability of polynucleotides to form base pairs with one another. Base pairs are typically formed by hydrogen bonds between nucleotide units in antiparallel polynucleotide strands. Complementary polynucleotide strands can form base pair in the Watson-Crick manner (e.g., A to T, A to U, C to G), or in any other manner that allows for the formation of duplexes. As persons skilled in the art are aware, when using RNA as opposed to DNA, uracil rather than thymine is the base that is considered to be complementary to adenosine. However, when a U is denoted in the context of the present invention, the ability to substitute a T is implied, unless otherwise stated. Perfect complementarity or 100% complementarity refers to the situation in which each nucleotide unit of one polynucleotide strand can form hydrogen bond with a nucleotide unit of a second polynucleotide strand. Less than perfect complementarity refers to the situation in which some, but not all, nucleotide units of two strands can form hydrogen bond with each other. For example, for two 20-mers, if only two base pairs on each strand can form hydrogen bond with each other, the polynucleotide strands exhibit 10% complementarity. In the same example, if 18 base pairs on each strand can form hydrogen bonds with each other, the polynucleotide strands exhibit 90% complementarity. As used herein, the term “substantially complementary” means that the siRNA has a sequence (e.g., in the antisense strand) which is sufficient to bind the desired target mRNA, and to trigger the RNA silencing of the target mRNA.

[0300] Composition: As used herein, the term “composition” comprises an AAV polynucleotide, AAV genome or AAV particle and at least one excipient.

[0301] Compound: As used herein, the term “compound,” refers to a distinct chemical entity. In some embodiments, a particular compound may exist in one or more isomeric or isotopic forms (including, but not limited to stereoisomers, geometric isomers and isotopes). In some embodiments, a compound is provided or utilized in only a single such form. In some embodiments, a compound is provided or utilized as a mixture of two or more such forms (including, but not limited to a racemic mixture of stereoisomers). Those of skill in the art appreciate that some compounds exist in different such forms, show different properties and/or activities (including, but not limited to biological activities). In such cases it is within the ordinary skill of those in the art to select or avoid particular forms of the compound for use in accordance with the present invention. For example, compounds that contain asymmetrically substituted carbon atoms can be isolated in optically active or racemic forms. Methods on how to prepare optically active forms from optically active starting materials are known in the art, such as by resolution of racemic mixtures or by stereoselective synthesis.

[0302] Conserved: As used herein, the term “conserved” refers to nucleotides or amino acid residues of polynucleotide or polypeptide sequences, respectively, that are those that occur unaltered in the same position of two or more sequences being compared. Nucleotides or amino acids that are relatively conserved are those that are conserved among more related sequences than nucleotides or amino acids appearing elsewhere in the sequences.

[0303] In some embodiments, two or more sequences are said to be “completely conserved” if they are 100% identical to one another. In some embodiments, two or more sequences are said to be “highly conserved” if they are at least 70% identical, at least 80% identical, at least 90% identical, or at least 95% identical to one another. In some embodiments, two or more sequences are said to be “highly conserved” if they are about 70% identical, about 80% identical, about 90% identical, about 95%, about 98%, or about 99% identical to one another. In some embodiments, two or more sequences are said to be “conserved” if they are at least 30% identical, at least 40% identical, at least 50% identical, at least 60% identical, at least 70% identical, at least 80% identical, at least 90% identical, or at least 95% identical to one another. In some embodiments, two or more sequences are said to be “conserved” if they are about 30% identical, about 40% identical, about 50% identical, about 60% identical, about 70% identical, about 80% identical, about 90% identical, about 95% identical, about 98% identical, or about 99% identical to one another. Conservation of sequence may apply to the entire length of an oligonucleotide or polypeptide or may apply to a portion, region or feature thereof.

[0304] In one embodiment, conserved sequences are not contiguous. Those skilled in the art are able to appreciate how to achieve alignment when gaps in contiguous alignment are present between sequences, and to align corresponding residues not withstanding insertions or deletions present.

[0305] Delivery: As used herein, “delivery” refers to the act or manner of delivering a parvovirus e.g., AAV compound, substance, entity, moiety, cargo or payload to a target. Such target may be a cell, tissue, organ, organism, or system (whether biological or production).

[0306] Delivery Agent: As used herein, “delivery agent” refers to any agent which facilitates, at least in part, the delivery of one or more substances (including, but not limited to a compounds and/or compositions of the present invention, e.g., viral particles or AAV vectors) to targeted cells.

[0307] Destabilized: As used herein, the term “destable,” “destabilize,” or “destabilizing region” means a region or molecule that is less stable than a starting, reference, wild-type or native form of the same region or molecule.

[0308] Detectable label: As used herein, “detectable label” refers to one or more markers, signals, or moieties which are attached, incorporated or associated with another entity, which markers, signals or moieties are readily detected by methods known in the art including radiography, fluorescence, chemiluminescence, enzymatic activity, absorbance, immunological detection and the like. Detectable labels may include radioisotopes, fluorophores, chromophores, enzymes, dyes, metal ions, ligands, biotin, avidin, streptavidin and haptens, quantum dots, polyhistidine tags, myc tags, flag tags, human influenza hemagglutinin (HA) tags and the like. Detectable labels may be located at any position in the entity with which they are attached, incorporated or associated. For example, when attached, incorporated in or associated with a peptide or protein, they may be within the amino acids, the peptides, or proteins, or located at the N- or C-termini.

[0309] Effective amount: As used herein, the term “effective amount” of an agent is that amount sufficient to effect beneficial or desired results, for example, upon single or multiple dose administration to a subject or a cell, in curing, alleviating, relieving or improving one or more symptoms of a disorder and, as such, an “effective amount” depends upon the context in which it is being applied. For example, in the context of administering an agent that treats ALS, an effective amount of an agent is, for example, an amount sufficient to achieve treatment, as defined herein, of ALS, as compared to the response obtained without administration of the agent.

[0310] Engineered: As used herein, embodiments of the invention are “engineered” when they are designed to have a feature or property, whether structural or chemical, that varies from a starting point, wild-type or native molecule. Thus, engineered agents or entities are those whose design and/or production include an act of the hand of man.

[0311] Epitope: As used herein, an “epitope” refers to a surface or region on a molecule that is capable of interacting with a biomolecule. For example a protein may contain one or more amino acids, e.g., an epitope, which interacts with an antibody, e.g., a biomolecule. In some embodiments, when referring to a protein or protein module, an epitope may comprise a linear stretch of amino acids or a three dimensional structure formed by folded amino acid chains.

[0312] Expression: As used herein, “expression” of a nucleic acid sequence refers to one or more of the following events: (1) production of an RNA template from a DNA sequence (e.g., by transcription); (2) processing of an RNA transcript (e.g., by splicing, editing, 5′ cap formation, and/or 3′ end processing); (3) translation of an RNA into a polypeptide or protein; (4) folding of a polypeptide or protein; and (5) post-translational modification of a polypeptide or protein.

[0313] Feature: As used herein, a “feature” refers to a characteristic, a property, or a distinctive element.

[0314] Formulation: As used herein, a “formulation” includes at least a compound and/or composition of the present invention (e.g., a vector, AAV particle, etc.) and a delivery agent.

[0315] Fragment: A “fragment,” as used herein, refers to a contiguous portion of a whole. For example, fragments of proteins may comprise polypeptides obtained by digesting full-length protein isolated from cultured cells. In some embodiments, a fragment of a protein includes at least 3, 4, 5, 6, 7, 8, 9, 10, 11, 12, 13, 14, 15, 16, 17, 18, 19, 20, 25, 30, 35, 40, 45, 50, 55, 60, 65, 70, 75, 80, 85, 90, 95, 100, 150, 200, 250 or more amino acids.

[0316] Functional: As used herein, a “functional” biological molecule is a biological entity with a structure and in a form in which it exhibits a property and/or activity by which it is characterized.

[0317] Gene expression: The term “gene expression” refers to the process by which a nucleic acid sequence undergoes successful transcription and in most instances translation to produce a protein or peptide. For clarity, when reference is made to measurement of “gene expression”, this should be understood to mean that measurements may be of the nucleic acid product of transcription, e.g., RNA or mRNA or of the amino acid product of translation, e.g., polypeptides or peptides. Methods of measuring the amount or levels of RNA, mRNA, polypeptides and peptides are well known in the art.

[0318] High Cervical Region: As used herein, the term “high cervical region” refers to the region of the spinal cord comprising the cervical vertebrae C1, C2, C3 and C4 or any subset thereof.

[0319] Homology: As used herein, the term “homology” refers to the overall relatedness between polymeric molecules, e.g. between nucleic acid molecules (e.g. DNA molecules and/or RNA molecules) and/or between polypeptide molecules. In some embodiments, polymeric molecules are considered to be “homologous” to one another if their sequences are at least 25%, 30%, 35%, 40%, 45%, 50%, 55%, 60%, 65%, 70%, 75%, 80%, 85%, 90%, 95%, or 99% identical or similar. The term “homologous” necessarily refers to a comparison between at least two sequences (polynucleotide or polypeptide sequences). In accordance with the invention, two polynucleotide sequences are considered to be homologous if the polypeptides they encode are at least about 50%, 60%, 70%, 80%, 90%, 95%, or even 99% for at least one stretch of at least about 20 amino acids. In some embodiments, homologous polynucleotide sequences are characterized by the ability to encode a stretch of at least 4-5 uniquely specified amino acids. For polynucleotide sequences less than 60 nucleotides in length, homology is typically determined by the ability to encode a stretch of at least 4-5 uniquely specified amino acids. In accordance with the invention, two protein sequences are considered to be homologous if the proteins are at least about 50%, 60%, 70%, 80%, or 90% identical for at least one stretch of at least about 20 amino acids. In many embodiments, homologous protein may show a large overall degree of homology and a high degree of homology over at least one short stretch of at least 3, 4, 5, 6, 7, 8, 9, 10, 11, 12, 13, 14, 15, 16, 17, 18, 19, 20, 25, 30, 35, 40, 45, 50 or more amino acids. In many embodiments, homologous proteins share one or more characteristic sequence elements. As used herein, the term “characteristic sequence element” refers to a motif present in related proteins. In some embodiments, the presence of such motifs correlates with a particular activity (such as biological activity).

[0320] Identity: As used herein, the term “identity” refers to the overall relatedness between polymeric molecules, e.g., between oligonucleotide molecules (e.g. DNA molecules and/or RNA molecules) and/or between polypeptide molecules. Calculation of the percent identity of two polynucleotide sequences, for example, may be performed by aligning the two sequences for optimal comparison purposes (e.g., gaps can be introduced in one or both of a first and a second nucleic acid sequences for optimal alignment and non-identical sequences can be disregarded for comparison purposes). In certain embodiments, the length of a sequence aligned for comparison purposes is at least 30%, at least 40%, at least 50%, at least 60%, at least 70%, at least 80%, at least 90%, at least 95%, or 100% of the length of the reference sequence. The nucleotides at corresponding nucleotide positions are then compared. When a position in the first sequence is occupied by the same nucleotide as the corresponding position in the second sequence, then the molecules are identical at that position. The percent identity between the two sequences is a function of the number of identical positions shared by the sequences, taking into account the number of gaps, and the length of each gap, which needs to be introduced for optimal alignment of the two sequences. The comparison of sequences and determination of percent identity between two sequences can be accomplished using a mathematical algorithm. For example, the percent identity between two nucleotide sequences can be determined using methods such as those described in Computational Molecular Biology, Lesk, A. M., ed., Oxford University Press, New York, 1988; Biocomputing: Informatics and Genome Projects, Smith, D. W., ed., Academic Press, New York, 1993; Sequence Analysis in Molecular Biology, von Heinje, G., Academic Press, 1987; Computer Analysis of Sequence Data, Part I, Griffin, A. M., and Griffin, H. G., eds., Humana Press, New Jersey, 1994; and Sequence Analysis Primer, Gribskov, M. and Devereux, J., eds., M Stockton Press, New York, 1991; each of which is incorporated herein by reference in its entirety. For example, the percent identity between two nucleotide sequences can be determined, for example using the algorithm of Meyers and Miller (CABIOS, 1989, 4:11-17), which has been incorporated into the ALIGN program (version 2.0) using a PAM120 weight residue table, a gap length penalty of 12 and a gap penalty of 4. The percent identity between two nucleotide sequences can, alternatively, be determined using the GAP program in the GCG software package using an NWSgapdna.CMP matrix. Methods commonly employed to determine percent identity between sequences include, but are not limited to those disclosed in Carillo, H., and Lipman, D., SIAM J Applied Math., 48:1073 (1988); incorporated herein by reference in its entirety. Techniques for determining identity are codified in publicly available computer programs. Computer software to determine homology between two sequences include, but are not limited to, GCG program package, Devereux, J., et al., Nucleic Acids Research, 12(1), 387 (1984)), BLASTP, BLASTN, and FASTA Altschul, S. F. et al., J. Molec. Biol., 215, 403 (1990)).

[0321] Inhibit expression of a gene: As used herein, the phrase “inhibit expression of a gene” means to cause a reduction in the amount of an expression product of the gene. The expression product may be RNA transcribed from the gene (e.g. mRNA) or a polypeptide translated from mRNA transcribed from the gene. Typically a reduction in the level of mRNA results in a reduction in the level of a polypeptide translated therefrom. The level of expression may be determined using standard techniques for measuring mRNA or protein.

[0322] In vitro: As used herein, the term “in vitro” refers to events that occur in an artificial environment, e.g., in a test tube or reaction vessel, in cell culture, in a Petri dish, etc., rather than within an organism (e.g., animal, plant, or microbe).

[0323] In vivo: As used herein, the term “in vivo” refers to events that occur within an organism (e.g., animal, plant, or microbe or cell or tissue thereof).

[0324] Isolated: As used herein, the term “isolated” is synonymous with “separated”, but carries with it the inference separation was carried out by the hand of man. In one embodiment, an isolated substance or entity is one that has been separated from at least some of the components with which it was previously associated (whether in nature or in an experimental setting). Isolated substances may have varying levels of purity in reference to the substances from which they have been associated. Isolated substances and/or entities may be separated from at least about 10%, about 20%, about 30%, about 40%, about 50%, about 60%, about 70%, about 80%, about 90%, or more of the other components with which they were initially associated. In some embodiments, isolated agents are more than about 80%, about 85%, about 90%, about 91%, about 92%, about 93%, about 94%, about 95%, about 96%, about 97%, about 98%, about 99%, or more than about 99% pure. As used herein, a substance is “pure” if it is substantially free of other components.

[0325] Substantially isolated: By “substantially isolated” is meant that the compound is substantially separated from the environment in which it was formed or detected. Partial separation can include, for example, a composition enriched in the compound of the present disclosure. Substantial separation can include compositions containing at least about 50%, at least about 60%, at least about 70%, at least about 80%, at least about 90%, at least about 95%, at least about 97%, or at least about 99% by weight of the compound of the present disclosure, or salt thereof. Methods for isolating compounds and their salts are routine in the art. In some embodiments, isolation of a substance or entity includes disruption of chemical associations and/or bonds. In some embodiments, isolation includes only the separation from components with which the isolated substance or entity was previously combined and does not include such disruption.

[0326] Lumbar Region: As used herein, the term “lumbar region” refers to the region of the spinal cord comprising the lumbar vertebrae L1, L2, L3, L4, and L5.

[0327] Modified: As used herein, the term “modified” refers to a changed state or structure of a molecule or entity as compared with a parent or reference molecule or entity. Molecules may be modified in many ways including chemically, structurally, and functionally. In some embodiments, compounds and/or compositions of the present invention are modified by the introduction of non-natural amino acids, or non-natural nucleotides.

[0328] Mutation: As used herein, the term “mutation” refers to a change and/or alteration. In some embodiments, mutations may be changes and/or alterations to proteins (including peptides and polypeptides) and/or nucleic acids (including polynucleic acids). In some embodiments, mutations comprise changes and/or alterations to a protein and/or nucleic acid sequence. Such changes and/or alterations may comprise the addition, substitution and or deletion of one or more amino acids (in the case of proteins and/or peptides) and/or nucleotides (in the case of nucleic acids and or polynucleic acids). In embodiments wherein mutations comprise the addition and/or substitution of amino acids and/or nucleotides, such additions and/or substitutions may comprise 1 or more amino acid and/or nucleotide residues and may include modified amino acids and/or nucleotides.

[0329] Naturally occurring: As used herein, “naturally occurring” or “wild-type” means existing in nature without artificial aid, or involvement of the hand of man.

[0330] Non-human vertebrate: As used herein, a “non-human vertebrate” includes all vertebrates except Homo sapiens, including wild and domesticated species. Examples of non-human vertebrates include, but are not limited to, mammals, such as alpaca, banteng, bison, camel, cat, cattle, deer, dog, donkey, gayal, goat, guinea pig, horse, llama, mule, pig, rabbit, reindeer, sheep water buffalo, and yak.

[0331] Nucleic acid: As used herein, the term “nucleic acid”, “polynucleotide” and ‘oligonucleotide” refer to any nucleic acid polymers composed of either polydeoxyribonucleotides (containing 2-deoxy-D-ribose), or polyribonucleotides (containing D-ribose), or any other type of polynucleotide which is an N glycoside of a purine or pyrimidine base, or modified purine or pyrimidine bases. There is no intended distinction in length between the term “nucleic acid”, “polynucleotide” and “oligonucleotide”, and these terms will be used interchangeably. These terms refer only to the primary structure of the molecule. Thus, these terms include double- and single-stranded DNA, as well as double- and single stranded RNA.

[0332] Off-target: As used herein, “off target” refers to any unintended effect on any one or more target, gene and/or cellular transcript.

[0333] Operably linked: As used herein, the phrase “operably linked” refers to a functional connection between two or more molecules, constructs, transcripts, entities, moieties or the like.

[0334] Particle: As used herein, a “particle” is a virus comprised of at least two components, a protein capsid and a polynucleotide sequence enclosed within the capsid.

[0335] Patient: As used herein, “patient” refers to a subject who may seek or be in need of treatment, requires treatment, is receiving treatment, will receive treatment, or a subject who is under care by a trained (e.g., licensed) professional for a particular disease or condition.

[0336] Payload: As used herein, “payload” refers to one or more polynucleotides or polynucleotide regions encoded by or within a viral genome or an expression product of such polynucleotide or polynucleotide region, e.g., a transgene, a polynucleotide encoding a polypeptide or multi-polypeptide or a modulatory nucleic acid or regulatory nucleic acid.

[0337] Payload construct: As used herein, “payload construct” is one or more polynucleotide regions encoding or comprising a payload that is flanked on one or both sides by an inverted terminal repeat (ITR) sequence. The payload construct is a template that is replicated in a viral production cell to produce a viral genome.

[0338] Payload construct vector: As used herein, “payload construct vector” is a vector encoding or comprising a payload construct, and regulatory regions for replication and expression in bacterial cells. The payload construct vector may also comprise component for viral expression in a viral replication cell

[0339] Peptide: As used herein, the term “peptide” refers to a chain of amino acids that is less than or equal to about 50 amino acids long, e.g., about 5, 10, 15, 20, 25, 30, 35, 40, 45, or 50 amino acids long.

[0340] Pharmaceutically acceptable: The phrase “pharmaceutically acceptable” is employed herein to refer to those compounds, materials, compositions, and/or dosage forms which are, within the scope of sound medical judgment, suitable for use in contact with the tissues of human beings and animals without excessive toxicity, irritation, allergic response, or other problem or complication, commensurate with a reasonable benefit/risk ratio.

[0341] Pharmaceutically acceptable excipients: As used herein, the term “pharmaceutically acceptable excipient,” as used herein, refers to any ingredient other than active agents (e.g., as described herein) present in pharmaceutical compositions and having the properties of being substantially nontoxic and non-inflammatory in subjects. In some embodiments, pharmaceutically acceptable excipients are vehicles capable of suspending and/or dissolving active agents. Excipients may include, for example: antiadherents, antioxidants, binders, coatings, compression aids, disintegrants, dyes (colors), emollients, emulsifiers, fillers (diluents), film formers or coatings, flavors, fragrances, glidants (flow enhancers), lubricants, preservatives, printing inks, sorbents, suspending or dispersing agents, sweeteners, and waters of hydration. Excipients include, but are not limited to: butylated hydroxytoluene (BHT), calcium carbonate, calcium phosphate (dibasic), calcium stearate, croscarmellose, cross-linked polyvinyl pyrrolidone, citric acid, crospovidone, cysteine, ethylcellulose, gelatin, hydroxypropyl cellulose, hydroxypropyl methylcellulose, lactose, magnesium stearate, maltitol, mannitol, methionine, methylcellulose, methyl paraben, microcrystalline cellulose, polyethylene glycol, polyvinyl pyrrolidone, povidone, pregelatinized starch, propyl paraben, retinyl palmitate, shellac, silicon dioxide, sodium carboxymethyl cellulose, sodium citrate, sodium starch glycolate, sorbitol, starch (corn), stearic acid, sucrose, talc, titanium dioxide, vitamin A, vitamin E, vitamin C, and xylitol.

[0342] Pharmaceutically acceptable salts: Pharmaceutically acceptable salts of the compounds described herein are forms of the disclosed compounds wherein the acid or base moiety is in its salt form (e.g., as generated by reacting a free base group with a suitable organic acid). Examples of pharmaceutically acceptable salts include, but are not limited to, mineral or organic acid salts of basic residues such as amines; alkali or organic salts of acidic residues such as carboxylic acids; and the like. Representative acid addition salts include acetate, adipate, alginate, ascorbate, aspartate, benzenesulfonate, benzoate, bisulfate, borate, butyrate, camphorate, camphorsulfonate, citrate, cyclopentanepropionate, digluconate, dodecylsulfate, ethanesulfonate, fumarate, glucoheptonate, glycerophosphate, hemisulfate, heptonate, hexanoate, hydrobromide, hydrochloride, hydroiodide, 2-hydroxy-ethanesulfonate, lactobionate, lactate, laurate, lauryl sulfate, malate, maleate, malonate, methanesulfonate, 2-naphthalenesulfonate, nicotinate, nitrate, oleate, oxalate, palmitate, pamoate, pectinate, persulfate, 3-phenylpropionate, phosphate, picrate, pivalate, propionate, stearate, succinate, sulfate, tartrate, thiocyanate, toluenesulfonate, undecanoate, valerate salts, and the like. Representative alkali or alkaline earth metal salts include sodium, lithium, potassium, calcium, magnesium, and the like, as well as nontoxic ammonium, quaternary ammonium, and amine cations, including, but not limited to ammonium, tetramethylammonium, tetraethylammonium, methylamine, dimethylamine, trimethylamine, triethylamine, ethylamine, and the like. Pharmaceutically acceptable salts include the conventional non-toxic salts, for example, from non-toxic inorganic or organic acids. In some embodiments a pharmaceutically acceptable salt is prepared from a parent compound which contains a basic or acidic moiety by conventional chemical methods. Generally, such salts can be prepared by reacting the free acid or base forms of these compounds with a stoichiometric amount of the appropriate base or acid in water or in an organic solvent, or in a mixture of the two; generally, nonaqueous media like ether, ethyl acetate, ethanol, isopropanol, or acetonitrile are preferred. Lists of suitable salts are found in Remington's Pharmaceutical Sciences, 17th ed., Mack Publishing Company, Easton, Pa., 1985, p. 1418, Pharmaceutical Salts: Properties, Selection, and Use, P. H. Stahl and C. G. Wermuth (eds.), Wiley-VCH, 2008, and Berge et al., Journal of Pharmaceutical Science, 66, 1-19 (1977), each of which is incorporated herein by reference in its entirety. Pharmaceutically acceptable solvate: The term “pharmaceutically acceptable solvate,” as used herein, refers to a crystalline form of a compound wherein molecules of a suitable solvent are incorporated in the crystal lattice. For example, solvates may be prepared by crystallization, recrystallization, or precipitation from a solution that includes organic solvents, water, or a mixture thereof. Examples of suitable solvents are ethanol, water (for example, mono-, di-, and tri-hydrates), N-methylpyrrolidinone (NMP), dimethyl sulfoxide (DMSO), N,N′-dimethylformamide (DMF), N,N′-dimethylacetamide (DMAC), 1,3-dimethyl-2-imidazolidinone (DMEU), 1,3-dimethyl-3,4,5,6-tetrahydro-2-(1H)-pyrimidinone (DMPU), acetonitrile (ACN), propylene glycol, ethyl acetate, benzyl alcohol, 2-pyrrolidone, benzyl benzoate, and the like. When water is the solvent, the solvate is referred to as a “hydrate.” In some embodiments, the solvent incorporated into a solvate is of a type or at a level that is physiologically tolerable to an organism to which the solvate is administered (e.g., in a unit dosage form of a pharmaceutical composition).

[0343] Pharmaceutical Composition: As used herein, the term “pharmaceutical composition” or pharmaceutically acceptable composition” comprises an AAV polynucleotides, AAV genomes or AAV particle and one or more pharmaceutically acceptable excipients.

[0344] Pharmacokinetic: As used herein, “pharmacokinetic” refers to any one or more properties of a molecule or compound as it relates to the determination of the fate of substances administered to living organisms. Pharmacokinetics are divided into several areas including the extent and rate of absorption, distribution, metabolism and excretion. This is commonly referred to as ADME where: (A) Absorption is the process of a substance entering the blood circulation; (D) Distribution is the dispersion or dissemination of substances throughout the fluids and tissues of the body; (M) Metabolism (or Biotransformation) is the irreversible transformation of parent compounds into daughter metabolites; and (E) Excretion (or Elimination) refers to the elimination of the substances from the body. In rare cases, some drugs irreversibly accumulate in body tissue.

[0345] Physicochemical: As used herein, “physicochemical” means of or relating to a physical and/or chemical property.

[0346] Preventing: As used herein, the term “preventing” refers to partially or completely delaying onset of an infection, disease, disorder and/or condition; partially or completely delaying onset of one or more symptoms, features, or clinical manifestations of a particular infection, disease, disorder, and/or condition; partially or completely delaying onset of one or more symptoms, features, or manifestations of a particular infection, disease, disorder, and/or condition; partially or completely delaying progression from an infection, a particular disease, disorder and/or condition; and/or decreasing the risk of developing pathology associated with the infection, the disease, disorder, and/or condition.

[0347] Proliferate: As used herein, the term “proliferate” means to grow, expand, replicate or increase or cause to grow, expand, replicate or increase. “Proliferative” means having the ability to proliferate. “Anti-proliferative” means having properties counter to or in opposition to proliferative properties.

[0348] Protein of interest: As used herein, the terms “proteins of interest” or “desired proteins” include those provided herein and fragments, mutants, variants, and alterations thereof.

[0349] Purified: As used herein, the term “purify” means to make substantially pure or clear from unwanted components, material defilement, admixture or imperfection. “Purified” refers to the state of being pure. “Purification” refers to the process of making pure.

[0350] Region: As used herein, the term “region” refers to a zone or general area. In some embodiments, when referring to a protein or protein module, a region may comprise a linear sequence of amino acids along the protein or protein module or may comprise a three dimensional area, an epitope and/or a cluster of epitopes. In some embodiments, regions comprise terminal regions. As used herein, the term “terminal region” refers to regions located at the ends or termini of a given agent. When referring to proteins, terminal regions may comprise N- and/or C-termini. N-termini refer to the end of a protein comprising an amino acid with a free amino group. C-termini refer to the end of a protein comprising an amino acid with a free carboxyl group. N- and/or C-terminal regions may there for comprise the N- and/or C-termini as well as surrounding amino acids. In some embodiments, N- and/or C-terminal regions comprise from about 3 amino acid to about 30 amino acids, from about 5 amino acids to about 40 amino acids, from about 10 amino acids to about 50 amino acids, from about 20 amino acids to about 100 amino acids and/or at least 100 amino acids. In some embodiments, N-terminal regions may comprise any length of amino acids that includes the N-terminus, but does not include the C-terminus. In some embodiments, C-terminal regions may comprise any length of amino acids, which include the C-terminus, but do not comprise the N-terminus.

[0351] In some embodiments, when referring to a polynucleotide, a region may comprise a linear sequence of nucleic acids along the polynucleotide or may comprise a three dimensional area, secondary structure, or tertiary structure. In some embodiments, regions comprise terminal regions. As used herein, the term “terminal region” refers to regions located at the ends or termini of a given agent. When referring to polynucleotides, terminal regions may comprise 5′ and 3′ termini. 5′ termini refer to the end of a polynucleotide comprising a nucleic acid with a free phosphate group. 3′ termini refer to the end of a polynucleotide comprising a nucleic acid with a free hydroxyl group. 5′ and 3′ regions may there for comprise the 5′ and 3′ termini as well as surrounding nucleic acids. In some embodiments, 5′ and 3′ terminal regions comprise from about 9 nucleic acids to about 90 nucleic acids, from about 15 nucleic acids to about 120 nucleic acids, from about 30 nucleic acids to about 150 nucleic acids, from about 60 nucleic acids to about 300 nucleic acids and/or at least 300 nucleic acids. In some embodiments, 5′ regions may comprise any length of nucleic acids that includes the 5′ terminus, but does not include the 3′ terminus. In some embodiments, 3′ regions may comprise any length of nucleic acids, which include the 3′ terminus, but does not comprise the 5′ terminus.

[0352] RNA or RNA molecule: As used herein, the term “RNA” or “RNA molecule” or “ribonucleic acid molecule” refers to a polymer of ribonucleotides; the term “DNA” or “DNA molecule” or “deoxyribonucleic acid molecule” refers to a polymer of deoxyribonucleotides. DNA and RNA can be synthesized naturally, e.g., by DNA replication and transcription of DNA, respectively; or be chemically synthesized. DNA and RNA can be single-stranded (i.e., ssRNA or ssDNA, respectively) or multi-stranded (e.g., double stranded, i.e., dsRNA and dsDNA, respectively). The term “mRNA” or “messenger RNA”, as used herein, refers to a single stranded RNA that encodes the amino acid sequence of one or more polypeptide chains.

[0353] RNA interference: As used herein, the term “RNA interference” or “RNAi” refers to a sequence specific regulatory mechanism mediated by RNA molecules which results in the inhibition or interference or “silencing” of the expression of a corresponding protein-coding gene.

[0354] Sacral Region: As used herein, the term “sacral region” refers to the region of the spinal cord comprising the sacral vertebrae S1, S2, S3, S4, and S5.

[0355] Sample: As used herein, the term “sample” refers to an aliquot or portion taken from a source and/or provided for analysis or processing. In some embodiments, a sample is from a biological source such as a tissue, cell or component part (e.g. a body fluid, including but not limited to blood, mucus, lymphatic fluid, synovial fluid, cerebrospinal fluid, saliva, amniotic fluid, amniotic cord blood, urine, vaginal fluid and semen). In some embodiments, a sample may be or comprise a homogenate, lysate or extract prepared from a whole organism or a subset of its tissues, cells or component parts, or a fraction or portion thereof, including but not limited to, for example, plasma, serum, spinal fluid, lymph fluid, the external sections of the skin, respiratory, intestinal, and genitourinary tracts, tears, saliva, milk, blood cells, tumors, organs. In some embodiments, a sample is or comprises a medium, such as a nutrient broth or gel, which may contain cellular components, such as proteins or nucleic acid molecule. In some embodiments, a “primary” sample is an aliquot of the source. In some embodiments, a primary sample is subjected to one or more processing (e.g., separation, purification, etc.) steps to prepare a sample for analysis or other use.

[0356] Self-complementary viral particle: As used herein, a “self-complementary viral particle” is a particle comprised of at least two components, a protein capsid and a polynucleotide sequence encoding a self-complementary genome enclosed within the capsid.

[0357] Sense strand: As used herein, the term “the sense strand” or “the second strand” or “the passenger strand” of a siRNA molecule refers to a strand that is complementary to the antisense strand or first strand. The antisense and sense strands of a siRNA molecule are hybridized to form a duplex structure. As used herein, a “siRNA duplex” includes a siRNA strand having sufficient complementarity to a section of about 10-50 nucleotides of the mRNA of the gene targeted for silencing and a siRNA strand having sufficient complementarity to form a duplex with the siRNA strand.

[0358] Signal Sequences: As used herein, the phrase “signal sequences” refers to a sequence which can direct the transport or localization.

[0359] Single unit dose: As used herein, a “single unit dose” is a dose of any therapeutic administered in one dose/at one time/single route/single point of contact, i.e., single administration event. In some embodiments, a single unit dose is provided as a discrete dosage form (e.g., a tablet, capsule, patch, loaded syringe, vial, etc.).

[0360] Similarity: As used herein, the term “similarity” refers to the overall relatedness between polymeric molecules, e.g. between polynucleotide molecules (e.g. DNA molecules and/or RNA molecules) and/or between polypeptide molecules. Calculation of percent similarity of polymeric molecules to one another can be performed in the same manner as a calculation of percent identity, except that calculation of percent similarity takes into account conservative substitutions as is understood in the art.

[0361] Small/short interfering RNA: As used herein, the term “small/short interfering RNA” or “siRNA” refers to an RNA molecule (or RNA analog) comprising between about 5-60 nucleotides (or nucleotide analogs) which is capable of directing or mediating RNAi. Preferably, a siRNA molecule comprises between about 15-30 nucleotides or nucleotide analogs, more preferably between about 16-25 nucleotides (or nucleotide analogs), even more preferably between about 18-23 nucleotides (or nucleotide analogs), and even more preferably between about 19-22 nucleotides (or nucleotide analogs) (e.g., 19, 20, 21 or 22 nucleotides or nucleotide analogs). The term “short” siRNA refers to a siRNA comprising 5-23 nucleotides, preferably 21 nucleotides (or nucleotide analogs), for example, 19, 20, 21 or 22 nucleotides. The term “long” siRNA refers to a siRNA comprising 24-60 nucleotides, preferably about 24-25 nucleotides, for example, 23, 24, 25 or 26 nucleotides. Short siRNAs may, in some instances, include fewer than 19 nucleotides, e.g., 16, 17 or 18 nucleotides, or as few as 5 nucleotides, provided that the shorter siRNA retains the ability to mediate RNAi. Likewise, long siRNAs may, in some instances, include more than 26 nucleotides, e.g., 27, 28, 29, 30, 35, 40, 45, 50, 55, or even 60 nucleotides, provided that the longer siRNA retains the ability to mediate RNAi or translational repression absent further processing, e.g., enzymatic processing, to a short siRNA. siRNAs can be single stranded RNA molecules (ss-siRNAs) or double stranded RNA molecules (ds-siRNAs) comprising a sense strand and an antisense strand which hybridized to form a duplex structure called siRNA duplex.

[0362] Split dose: As used herein, a “split dose” is the division of single unit dose or total daily dose into two or more doses.

[0363] Stable: As used herein “stable” refers to a compound or entity that is sufficiently robust to survive isolation to a useful degree of purity from a reaction mixture, and preferably capable of formulation into an efficacious therapeutic agent.

[0364] Stabilized: As used herein, the term “stabilize”, “stabilized,” “stabilized region” means to make or become stable. In some embodiments, stability is measured relative to an absolute value. In some embodiments, stability is measured relative to a reference compound or entity.

[0365] Subject: As used herein, the term “subject” or “patient” refers to any organism to which a composition in accordance with the invention may be administered, e.g., for experimental, diagnostic, prophylactic, and/or therapeutic purposes. Typical subjects include animals (e.g., mammals such as mice, rats, rabbits, non-human primates, and humans).

[0366] Substantially: As used herein, the term “substantially” refers to the qualitative condition of exhibiting total or near-total extent or degree of a characteristic or property of interest. One of ordinary skill in the biological arts will understand that biological and chemical phenomena rarely, if ever, go to completion and/or proceed to completeness or achieve or avoid an absolute result. The term “substantially” is therefore used herein to capture the potential lack of completeness inherent in many biological and chemical phenomena.

[0367] Substantially equal: As used herein as it relates to time differences between doses, the term means plus/minus 2%.

[0368] Substantially simultaneously: As used herein and as it relates to plurality of doses, the term typically means within about 2 seconds.

[0369] Suffering from: An individual who is “suffering from” a disease, disorder, and/or condition has been diagnosed with or displays one or more symptoms of a disease, disorder, and/or condition.

[0370] Susceptible to: An individual who is “susceptible to” a disease, disorder, and/or condition has not been diagnosed with and/or may not exhibit symptoms of the disease, disorder, and/or condition but harbors a propensity to develop a disease or its symptoms. In some embodiments, an individual who is susceptible to a disease, disorder, and/or condition (for example, cancer) may be characterized by one or more of the following: (1) a genetic mutation associated with development of the disease, disorder, and/or condition; (2) a genetic polymorphism associated with development of the disease, disorder, and/or condition; (3) increased and/or decreased expression and/or activity of a protein and/or nucleic acid associated with the disease, disorder, and/or condition; (4) habits and/or lifestyles associated with development of the disease, disorder, and/or condition; (5) a family history of the disease, disorder, and/or condition; and (6) exposure to and/or infection with a microbe associated with development of the disease, disorder, and/or condition. In some embodiments, an individual who is susceptible to a disease, disorder, and/or condition will develop the disease, disorder, and/or condition. In some embodiments, an individual who is susceptible to a disease, disorder, and/or condition will not develop the disease, disorder, and/or condition.

[0371] Synthetic: The term “synthetic” means produced, prepared, and/or manufactured by the hand of man. Synthesis of polynucleotides or polypeptides or other molecules of the present invention may be chemical or enzymatic.

[0372] Targeting: As used herein, “targeting” means the process of design and selection of nucleic acid sequence that will hybridize to a target nucleic acid and induce a desired effect.

[0373] Targeted Cells: As used herein, “targeted cells” refers to any one or more cells of interest. The cells may be found in vitro, in vivo, in situ or in the tissue or organ of an organism. The organism may be an animal, preferably a mammal, more preferably a human and most preferably a patient.

[0374] Therapeutic Agent: The term “therapeutic agent” refers to any agent that, when administered to a subject has a therapeutic, diagnostic, and/or prophylactic effect and/or elicits a desired biological and/or pharmacological effect.

[0375] Therapeutically effective amount: As used herein, the term “therapeutically effective amount” means an amount of an agent to be delivered (e.g., nucleic acid, drug, therapeutic agent, diagnostic agent, prophylactic agent, etc.) that is sufficient, when administered to a subject suffering from or susceptible to an infection, disease, disorder, and/or condition, to treat, improve symptoms of, diagnose, prevent, and/or delay the onset of the infection, disease, disorder, and/or condition. In some embodiments, a therapeutically effective amount is provided in a single dose. In some embodiments, a therapeutically effective amount is administered in a dosage regimen comprising a plurality of doses. Those skilled in the art will appreciate that in some embodiments, a unit dosage form may be considered to comprise a therapeutically effective amount of a particular agent or entity if it comprises an amount that is effective when administered as part of such a dosage regimen.

[0376] Therapeutically effective outcome: As used herein, the term “therapeutically effective outcome” means an outcome that is sufficient in a subject suffering from or susceptible to an infection, disease, disorder, and/or condition, to treat, improve symptoms of, diagnose, prevent, and/or delay the onset of the infection, disease, disorder, and/or condition.

[0377] Thoracic Region: As used herein, a “thoracic region” refers to a region of the spinal cord comprising the thoracic vertebrae T1, T2, T3, T4, T5, T6, T7, T8, T9, T10, T11, and T12.

[0378] Total daily dose: As used herein, a “total daily dose” is an amount given or prescribed in a 24 hour period. It may be administered as a single unit dose.

[0379] Treating: As used herein, the term “treating” refers to partially or completely alleviating, ameliorating, improving, relieving, delaying onset of, inhibiting progression of, reducing severity of, and/or reducing incidence of one or more symptoms or features of a particular infection, disease, disorder, and/or condition. For example, “treating” cancer may refer to inhibiting survival, growth, and/or spread of a tumor. Treatment may be administered to a subject who does not exhibit signs of a disease, disorder, and/or condition and/or to a subject who exhibits only early signs of a disease, disorder, and/or condition for the purpose of decreasing the risk of developing pathology associated with the disease, disorder, and/or condition.

[0380] Unmodified: As used herein, “unmodified” refers to any substance, compound or molecule prior to being changed in any way. Unmodified may, but does not always, refer to the wild-type or native form of a biomolecule or entity. Molecules or entities may undergo a series of modifications whereby each modified product may serve as the “unmodified” starting molecule or entity for a subsequent modification.

[0381] Vector: As used herein, a “vector” is any molecule or moiety which transports, transduces or otherwise acts as a carrier of a heterologous molecule. Vectors of the present invention may be produced recombinantly and may be based on and/or may comprise adeno-associated virus (AAV) parent or reference sequence. Such parent or reference AAV sequences may serve as an original, second, third or subsequent sequence for engineering vectors. In non-limiting examples, such parent or reference AAV sequences may comprise any one or more of the following sequences: a polynucleotide sequence encoding a polypeptide or multi-polypeptide, which sequence may be wild-type or modified from wild-type and which sequence may encode full-length or partial sequence of a protein, protein domain, or one or more subunits of a protein; a polynucleotide comprising a modulatory or regulatory nucleic acid which sequence may be wild-type or modified from wild-type; and a transgene that may or may not be modified from wild-type sequence. These AAV sequences may serve as either the “donor” sequence of one or more codons (at the nucleic acid level) or amino acids (at the polypeptide level) or “acceptor” sequences of one or more codons (at the nucleic acid level) or amino acids (at the polypeptide level).

[0382] Viral construct vector: As used herein, a “viral construct vector” is a vector which comprises one or more polynucleotide regions encoding or comprising Rep and or Cap protein. A viral construct vector may also comprise one or more polynucleotide region encoding or comprising components for viral expression in a viral replication cell.

[0383] Viral genome: As used herein, a “viral genome” is a polynucleotide encoding at least one inverted terminal repeat (ITR), at least one regulatory sequence, and at least one payload. The viral genome is derived by replication of a payload construct from the payload construct vector. A viral genome encodes at least one copy of the payload construct.

### EQUIVALENTS AND SCOPE

[0384] Those skilled in the art will recognize, or be able to ascertain using no more than routine experimentation, many equivalents to the specific embodiments in accordance with the invention described herein. The scope of the present invention is not intended to be limited to the above Description, but rather is as set forth in the appended claims.

[0385] In the claims, articles such as “a,” “an,” and “the” may mean one or more than one unless indicated to the contrary or otherwise evident from the context. claims or descriptions that include “or” between one or more members of a group are considered satisfied if one, more than one, or all of the group members are present in, employed in, or otherwise relevant to a given product or process unless indicated to the contrary or otherwise evident from the context. The invention includes embodiments in which exactly one member of the group is present in, employed in, or otherwise relevant to a given product or process. The invention includes embodiments in which more than one, or the entire group members are present in, employed in, or otherwise relevant to a given product or process.

[0386] It is also noted that the term “comprising” is intended to be open and permits but does not require the inclusion of additional elements or steps. When the term “comprising” is used herein, the term “consisting of” is thus also encompassed and disclosed.

[0387] Where ranges are given, endpoints are included. Furthermore, it is to be understood that unless otherwise indicated or otherwise evident from the context and understanding of one of ordinary skill in the art, values that are expressed as ranges can assume any specific value or subrange within the stated ranges in different embodiments of the invention, to the tenth of the unit of the lower limit of the range, unless the context clearly dictates otherwise.

[0388] In addition, it is to be understood that any particular embodiment of the present invention that falls within the prior art may be explicitly excluded from any one or more of the claims. Since such embodiments are deemed to be known to one of ordinary skill in the art, they may be excluded even if the exclusion is not set forth explicitly herein. Any particular embodiment of the compositions of the invention (e.g., any antibiotic, therapeutic or active ingredient; any method of production; any method of use; etc.) can be excluded from any one or more claims, for any reason, whether or not related to the existence of prior art.

[0389] It is to be understood that the words which have been used are words of description rather than limitation, and that changes may be made within the purview of the appended claims without departing from the true scope and spirit of the invention in its broader aspects.

[0390] While the present invention has been described at some length and with some particularity with respect to the several described embodiments, it is not intended that it should be limited to any such particulars or embodiments or any particular embodiment, but it is to be construed with references to the appended claims so as to provide the broadest possible interpretation of such claims in view of the prior art and, therefore, to effectively encompass the intended scope of the invention.

### EXAMPLES

### Example 1. Design of Payload Constructs

[0391] Payload constructs were designed to comprise at a minimum a nucleic acid sequence encoding a frataxin protein.

[0392] Once designed, the sequence was engineered or synthesized or inserted in a plasmid or vector and administered to a cell or organism. Suitable plasmids or vectors were any which transduce or transfect the target cell.

[0393] Adeno-associated viral vectors (AAV), viral particles or entire viruses may be used.

[0394] Administration resulted in the processing of the payload construct to generate the frataxin protein which alters the etiology of the disease, in this case Friedriech's Ataxia.

[0395] AAV constructs were designed and built using standard molecular cloning techniques. FXN-tag transgenes were cloned into either pAAVss, pAAVsc, or pcDNA3.1 plasmid and the resulting clones were further sequenced to confirm the correctness of all elements such as ITRs, promoters, and tags.

[0396] In one non-limiting example, plasmids containing a payload construct are described herein and some are described in Table 3. These payload constructs in Table 3 may comprise a pCDNA3.1, pAAVss, or pAAVsc vectors and may comprise the following components: a CMV, CB6, CB7, PGK, GFAP, hSYN, mCMVe-hEF1p, SV40, CBA or FXN promoter; an SV40 or MVM/CBA intron; a full or partial Kozak sequence; a FXN (Frataxin), CS (citrate synthase), RPL (ribosomal protein), SOD2 (superoxide dismutase), or AH (aconitate hydratase) signal peptide, also known as a mitochondrial targeting sequence (MTS); a cmyc, flag, cmycflag3, 3flag, 3flagcmyc, HA long or HA short tag; a SV40, rabbit beta-globin, or bGH poly (A) signal, 3′ and/or 5′ ITR sequences derived from any AAV genome comprising a partial and/or wild type sequence; and either wild type Frataxin or codon optimized Frataxin.

TABLE 3
AAV constructs

| | | | | 0.5 | Signal | | | | | | SEQ |
|---|---|---|---|---|---|---|---|---|---|---|---|
| Vector | Promoter | Intron | Kozak | Kozak | Peptide | Payload | Tag | 5′ITR | Poly(A) | 3′ITR | ID NO |
| pCDNA3.1(+) | CMV | N/A | − | − | FXN | FXN | cmyc3flag | − | bGH | − | 1 |
| pCDNA3.1(+) | CMV | N/A | − | − | FXN | FXN | — | − | bGH | − | 2 |
| pCDNA3.1(+) | CMV | N/A | − | − | FXN | FXN | 3flag | − | bGH | − | 3 |
| pCDNA3.1(+) | CMV | N/A | − | − | FXN | FXN | 3flagcmyc | − | bGH | − | 4 |
| pCDNA3.1(+) | CMV | N/A | − | − | FXN | FXN | cmyc | − | bGH | − | 5 |
| pCDNA3.1(+) | CMV | N/A | − | − | FXN | FXN | HA(L) | − | bGH | − | 6 |
| pCDNA3.1(+) | CMV | N/A | − | − | FXN | FXN | HA(S) | − | bGH | − | 7 |
| pCDNA3.1(+) | CMV | N/A | + | − | CS | FXN | — | − | bGH | − | 8 |
| pCDNA3.1(+) | CMV | N/A | − | + | FXN | FXN | — | − | bGH | − | 9 |
| pAAVss | CB6 | N/A | − | + | FXN | FXN | — | + | SV40 | + | 10 |
| pAAVss | CB6 | MVM/CBA | − | + | FXN | FXN | — | + | SV40 | + | 11 |
| pAAVss | CB6 | SV40 | − | − | FXN | FXN | — | + | SV40 | + | 12 |
| pAAVss | CB6 | SV40 | − | − | FXN | CodOp | — | + | SV40 | + | 13 |
| | | | | | | FXN | | | | | |
| pAAVss | CB6 | SV40 | − | − | FXN | CodOp | — | + | SV40 | + | 14 |
| | | | | | | FXN | | | | | |
| pAAVss | CB6 | SV40 | − | − | FXN | CodOp | — | + | SV40 | + | 15 |
| | | | | | | FXN | | | | | |
| pAAVss | CB6 | SV40 | − | − | FXN | CodOp | — | + | SV40 | + | 16 |
| | | | | | | FXN | | | | | |
| pAAVss | CB6 | SV40 | − | − | FXN | CodOp | — | + | SV40 | + | 17 |
| | | | | | | FXN | | | | | |
| pAAVss | CB6 | SV40 | − | − | FXN | CodOp | — | + | SV40 | + | 18 |
| | | | | | | FXN | | | | | |
| pAAVss | CB6 | SV40 | − | − | FXN | CodOp | — | + | SV40 | + | 19 |
| | | | | | | FXN | | | | | |
| pAAVss | CB6 | SV40 | − | − | FXN | CodOp | — | + | SV40 | + | 20 |
| | | | | | | FXN | | | | | |
| pAAVss | CB6 | SV40 | − | − | FXN | CodOp | — | + | SV40 | + | 21 |
| | | | | | | FXN | | | | | |
| pAAVss | CB6 | SV40 | − | − | FXN | CodOp | — | + | SV40 | + | 22 |
| | | | | | | FXN | | | | | |
| pAAVss | CB6 | SV40 | − | − | FXN | CodOp | — | + | SV40 | + | 23 |
| | | | | | | FXN | | | | | |
| pAAVss | CB6 | SV40 | − | − | FXN | CodOp | — | + | SV40 | + | 24 |
| | | | | | | FXN | | | | | |
| pAAVss | CB6 | SV40 | + | − | AH | FXN | — | + | SV40 | + | 25 |
| pAAVss | CB6 | SV40 | + | − | CS | FXN | — | + | SV40 | + | 26 |
| pAAVss | CB6 | SV40 | + | − | CS | FXN | HA(L) | + | SV40 | + | 27 |
| pAAVss | CB6 | SV40 | + | − | CS | FXN | HA(S) | + | SV40 | + | 28 |
| pAAVss | CB6 | SV40 | − | + | FXN | FXN | — | + | SV40 | + | 29 |
| pAAVss | CB6 | SV40 | − | + | FXN | CodOp | — | + | SV40 | + | 30 |
| | | | | | | FXN | | | | | |
| pAAVss | CB6 | SV40 | − | + | FXN | CodOp | — | + | SV40 | + | 31 |
| | | | | | | FXN | | | | | |
| pAAVss | CB6 | SV40 | − | + | FXN | CodOp | — | + | SV40 | + | 32 |
| | | | | | | FXN | | | | | |
| pAAVss | CB6 | SV40 | − | + | FXN | CodOp | — | + | SV40 | + | 33 |
| | | | | | | FXN | | | | | |
| pAAVss | CB6 | SV40 | − | + | FXN | CodOp | — | + | SV40 | + | 34 |
| | | | | | | FXN | | | | | |
| pAAVss | CB6 | SV40 | − | + | FXN | CodOp | — | + | SV40 | + | 35 |
| | | | | | | FXN | | | | | |
| pAAVss | CB6 | SV40 | − | + | FXN | CodOp | — | + | SV40 | + | 36 |
| | | | | | | FXN | | | | | |
| pAAVss | CB6 | SV40 | + | − | RPL | FXN | — | + | SV40 | + | 37 |
| pAAVss | CB6 | SV40 | + | − | RPL | CodOp | — | + | SV40 | + | 38 |
| | | | | | | FXN | | | | | |
| pAAVss | CB6 | SV40 | − | + | SOD2 | CodOp | — | + | SV40 | + | 39 |
| | | | | | | FXN | | | | | |
| pAAVss | CB7 | SV40 | − | − | FXN | FXN | — | + | SV40 | + | 40 |
| pAAVss | CMV | N/A | − | + | FXN | FXN | — | + | SV40 | + | 41 |
| pAAVss | CMV | SV40 | − | − | FXN | FXN | — | + | SV40 | + | 42 |
| pAAVss | CMV | SV40 | − | − | FXN | CodOp | — | + | SV40 | + | 43 |
| | | | | | | FXN | | | | | |
| pAAVss | CMV | SV40 | − | − | FXN | CodOp | — | + | SV40 | + | 44 |
| | | | | | | FXN | | | | | |
| pAAVss | CMV | SV40 | − | − | FXN | CodOp | — | + | SV40 | + | 45 |
| | | | | | | FXN | | | | | |
| pAAVss | CMV | SV40 | − | − | FXN | CodOp | — | + | SV40 | + | 46 |
| | | | | | | FXN | | | | | |
| pAAVss | CMV | SV40 | − | + | FXN | FXN | — | + | SV40 | + | 47 |
| pAAVss | FXNp | SV40 | − | − | FXN | FXN | — | + | SV40 | + | 48 |
| pAAVss | FXNp | SV40 | − | − | FXN | CodOp | — | + | SV40 | + | 49 |
| | | | | | | FXN | | | | | |
| pAAVss | FXNp | SV40 | − | − | FXN | CodOp | — | + | SV40 | + | 50 |
| | | | | | | FXN | | | | | |
| pAAVss | FXNp | SV40 | − | − | FXN | CodOp | — | + | SV40 | + | 51 |
| | | | | | | FXN | | | | | |
| pAAVss | FXNp | SV40 | − | − | FXN | CodOp | — | + | SV40 | + | 52 |
| | | | | | | FXN | | | | | |
| pAAVss | GFAP | SV40 | − | − | FXN | FXN | — | + | SV40 | + | 53 |
| pAAVss | hSYN | SV40 | − | − | FXN | FXN | — | + | SV40 | + | 54 |
| pAAVss | mCMVe- | SV40 | − | − | FXN | FXN | — | + | SV40 | + | 55 |
| | hEF1p | | | | | | | | | | |
| pAAVss | mCMVe- | SV40 | − | − | FXN | FXN | — | + | SV40 | + | 56 |
| | hEF1p | | | | | | | | | | |
| pAAVss | PGK | SV40 | − | − | FXN | FXN | — | + | SV40 | + | 57 |
| pAAVss | PGK | SV40 | − | − | FXN | CodOp | — | + | SV40 | + | 58 |
| | | | | | | FXN | | | | | |
| pAAVss | PGK | SV40 | − | − | FXN | CodOp | — | + | SV40 | + | 59 |
| | | | | | | FXN | | | | | |
| pAAVss | PGK | SV40 | − | − | FXN | CodOp | — | + | SV40 | + | 60 |
| | | | | | | FXN | | | | | |
| pAAVss | PGK | SV40 | − | − | FXN | CodOp | — | + | SV40 | + | 61 |
| | | | | | | FXN | | | | | |
| pAAVss | SV40 | SV40 | − | − | FXN | FXN | — | + | SV40 | + | 62 |
| pAAVsc | CBA | SV40 | − | − | FXN | FXN | — | + | SV40 | + | 63 |
| pAAVsc | CBA | SV40 | − | − | FXN | FXN | HA(S) | + | SV40 | + | 64 |
| pAAVsc | CBA | SV40 | − | − | FXN | FXN | 3flag | + | SV40 | + | 65 |
| pAAVsc | CBA | SV40 | − | − | FXN | FXN | 3flagcmyc | + | SV40 | + | 66 |
| pAAVsc | CBA | SV40 | − | − | FXN | FXN | cmyc | + | SV40 | + | 67 |
| pAAVsc | CBA | SV40 | − | − | FXN | FXN | cmyc3flag | + | SV40 | + | 68 |
| pAAVsc | CBA | SV40 | − | − | FXN | CodOp | — | + | SV40 | + | 69 |
| | | | | | | FXN | | | | | |
| pAAVsc | CBA | SV40 | − | − | FXN | CodOp | — | + | SV40 | + | 70 |
| | | | | | | FXN | | | | | |
| pAAVsc | CBA | SV40 | − | − | FXN | CodOp | — | + | SV40 | + | 71 |
| | | | | | | FXN | | | | | |
| pAAVsc | CBA | SV40 | − | − | FXN | CodOp | — | + | SV40 | + | 72 |
| | | | | | | FXN | | | | | |
| pAAVsc | CMV | SV40 | − | − | FXN | FXN | — | + | SV40 | + | 73 |
| pAAVsc | CMV | SV40 | − | − | FXN | CodOp | — | + | SV40 | + | 74 |
| | | | | | | FXN | | | | | |
| pAAVsc | CMV | SV40 | − | − | FXN | CodOp | — | + | SV40 | + | 75 |
| | | | | | | FXN | | | | | |
| pAAVsc | CMV | SV40 | − | − | FXN | CodOp | — | + | SV40 | + | 76 |
| | | | | | | FXN | | | | | |
| pAAVsc | CMV | SV40 | − | − | FXN | CodOp | — | + | SV40 | + | 77 |
| | | | | | | FXN | | | | | |
| pAAVsc | CMV | SV40 | − | + | FXN | FXN | — | + | SV40 | + | 78 |
| pAAVsc | FXNp | SV40 | − | − | FXN | FXN | — | + | SV40 | + | 79 |
| pAAVsc | FXNp | SV40 | − | − | FXN | CodOp | — | + | SV40 | + | 80 |
| | | | | | | FXN | | | | | |
| pAAVsc | FXNp | SV40 | − | − | FXN | CodOp | — | + | SV40 | + | 81 |
| | | | | | | FXN | | | | | |
| pAAVsc | FXNp | SV40 | − | − | FXN | CodOp | — | + | SV40 | + | 82 |
| | | | | | | FXN | | | | | |
| pAAVsc | FXNp | SV40 | − | − | FXN | CodOp | — | + | SV40 | + | 83 |
| | | | | | | FXN | | | | | |
| pAAVsc | GFAP | SV40 | − | − | FXN | FXN | — | + | SV40 | + | 84 |
| pAAVsc | PGK | SV40 | − | − | FXN | FXN | — | + | SV40 | + | 85 |
| pAAVsc | PGK | SV40 | − | − | FXN | CodOp | — | + | SV40 | + | 86 |
| | | | | | | FXN | | | | | |
| pAAVsc | PGK | SV40 | − | − | FXN | CodOp | — | + | SV40 | + | 87 |
| | | | | | | FXN | | | | | |
| pAAVsc | PGK | SV40 | − | − | FXN | CodOp | — | + | SV40 | + | 88 |
| | | | | | | FXN | | | | | |
| pAAVsc | PGK | SV40 | − | − | FXN | CodOp | — | + | SV40 | + | 89 |
| | | | | | | FXN | | | | | |
| pAAVss | CB6 | SV40 | − | + | FXN | FXN | — | + | SV40 | + | 90 |
| pAAVsc | CBA | SV40 | − | + | FXN | FXN | — | + | SV40 | + | 91 |
| pAAVss | N/A | SV40 | − | − | FXN | FXN | — | + | SV41 | + | 92 |
| pAAVss | CBA | SV40 | − | − | FXN | FXN | — | + | SV42 | + | 93 |

[0397] Plasmid constructs suitable for use in AAV particles include those listed in the sequence listing.

### Example 2. Plasmid Construct Component Modules

[0398] Plasmid constructs were designed according to Table 4. The start and stop positions of various components given are relative to the AAV particles described in the sequence listing.

TABLE 4
Component modules or sequence regions of plasmid constructs

| | | SEQ ID NO | | | | | | | |
|---|---|---|---|---|---|---|---|---|---|
| | | 73 | 63 | 79 | 85 | 75 | 70 | 81 | 87 |
| 5′ITR | Start | 65 | 1 | 65 | 65 | 65 | 1 | 65 | 65 |
| | Stop | 169 | 105 | 169 | 169 | 169 | 105 | 169 | 169 |
| Pro- | Start | 205 | 138 | 217 | 214 | 205 | 138 | 217 | 214 |
| moter | Stop | 883 | 789 | 1569 | 735 | 883 | 789 | 1569 | 735 |
| SV40 | Start | 897 | 803 | 1576 | 742 | 897 | 803 | 1576 | 742 |
| | Stop | 1068 | 974 | 1747 | 913 | 1068 | 974 | 1747 | 913 |
| FXN | Start | 1086 | 992 | 1765 | 931 | 1086 | 992 | 1765 | 931 |
| | Stop | 1718 | 1624 | 2397 | 1563 | 1718 | 1624 | 2397 | 1563 |
| Poly(A) | Start | 1798 | 1704 | 2477 | 1643 | 1752 | 1658 | 2431 | 1597 |
| | Stop | 1924 | 1830 | 2603 | 1769 | 1878 | 1784 | 2557 | 1723 |
| 3′ITR | Start | 1968 | 1874 | 2647 | 1813 | 1922 | 1828 | 2601 | 1767 |
| | Stop | 2097 | 2003 | 2776 | 1942 | 2051 | 1957 | 2730 | 1896 |

### Example 3. ELISA Assay for Detecting Differential Payload Expression from Regulatory Elements

[0399] The HEK293 cell line was transfected with AAV constructs, SEQ ID Nos. 10-12, 14, 16, 19, 20, 22-26, 29-39, 41-52, 57-61, 63, 70, 73, 75, 79, 81, 85, or 87 to assay the level of expression of a Frataxin payload sequence under control of various regulatory elements. The gWiz-GFP plasmid was co-transfected with each construct as an internal transfection efficiency control. The transfected 293FT cells were harvested 48 hours post-transfection, lysed using the THERMO SCIENTIFIC™ PIERCE™ M-PER™ Mammalian Protein Extraction Reagent, and resuspended in 200 ul of lysis buffer. Protein concentration in each of the samples was measured using the THERMO SCIENTIFIC™ PIERCE™ BCA™ Protein Assay.

[0400] ELISA assays for detecting expressed FXN and GFP in cell lysates were performed using the Abcam SimpleStep ELISA kit for FXN and GFP. The results in Tables 5-11 represent Frataxin expression values normalized to GFP. Comparison of expression levels between FXN constructs is represented by further normalization of Frataxin levels relative to reference Frataxin levels.

[0401] The results in Tables 5 and 6 represent Frataxin expression values from constructs containing a Kozak Sequence (GCCACCATG) compared to constructs lacking a Kozak sequence.

TABLE 5
Effect of Kozak Sequence on Frataxin Expression In Vitro

| | Relative | SEQ |
|---|---|---|
| Kozak | Expression | ID NO. |
| No | 1.91 | 42 |
| Yes | 1.73 | 47 |
| No | 1.49 | 20 |
| Yes | 0.76 | 30 |
| Yes | 1.24 | 29 |
| No | 0.98 | 12 |

TABLE 6
Effect of Kozak Sequence on Frataxin Expression In Vitro

| | Relative | SEQ |
|---|---|---|
| Kozak | Expression | ID NO. |
| No | 1.45 | 23 |
| Yes | 1.56 | 31 |
| No | 0.76 | 24 |
| Yes | 0.77 | 32 |
| N/A | 1.00 | 12 |

[0402] The construct encoding a codon-optimized frataxin driven by the CB6 promoter and lacking a Kozak sequence (SEQ ID NO: 20) gave the highest FXN expression compared to a similar construct with a Kozak sequence (SEQ ID NO: 30).

[0403] The results in Table 7 represent Frataxin expression values from constructs comprising a mitochondrial targeting sequence (MTS), also referred to herein as a signal peptide, compared to constructs lacking an MTS. A wild-type FXN MTS (SEQ ID NO: 29) results in the highest level of FXN protein expression in this experiment.

TABLE 7
Effect of Signal Peptide - Mitochondrial Targeting
Sequence on Frataxin Expression In Vitro

| Signal | Relative | Standard | SEQ |
|---|---|---|---|
| Peptide | Expression | Deviation | ID NO. |
| RPL | 0.64 | 0.00 | 37 |
| CS | 0.53 | 0.01 | 26 |
| SOD2 | 0.80 | 0.01 | 39 |
| AH | 0.49 | 0.01 | 25 |
| N/A | 0.98 | 0.02 | 29 |
| N/A | 1.02 | 0.06 | 12 |

[0404] The results in Table 8 represent Frataxin expression values from constructs comprising an SV40 intron compared to constructs lacking an SV40 intron. The presence of an SV40 intron had no significant effect on CMV and CB6-driven FXN expression in HEK293 cells.

TABLE 8
Effect of SV40 Intron on Frataxin Expression In Vitro

| SV40 | Relative | Standard | SEQ |
|---|---|---|---|
| Intron | Expression | Deviation | ID NO. |
| Yes | 1.24 | 0.00 | 29 |
| No | 1.03 | 0.02 | 10 |
| Yes | 2.26 | 0.11 | 47 |
| No | 2.43 | 0.23 | 41 |
| No | 1.26 | 0.03 | 11 |
| No | 1.00 | 0.09 | 12 |

[0405] The results in Table 9 represent Frataxin expression values from constructs comprising codon optimized frataxin sequences compared to a construct comprising a wild-type frataxin sequence. The effect of Frataxin transgene codon optimization on expression level was variable, with the highest expression levels observed in SEQ ID NOs. 20 and 22.

TABLE 9
Effect of Codon Optimization on Frataxin Expression In Vitro

| Codon | Relative | Standard | SEQ |
|---|---|---|---|
| Optimized | Expression | Deviation | ID NO. |
| Yes | 0.96 | 0.02 | 33 |
| Yes | 0.81 | 0.01 | 34 |
| Yes | 1.32 | 0.10 | 35 |
| Yes | 1.06 | 0.03 | 36 |
| Yes | 1.56 | N/A | 31 |
| Yes | 0.77 | N/A | 32 |
| Yes | 1.72 | 0.04 | 14 |
| Yes | 1.88 | 0.36 | 16 |
| Yes | 1.07 | 0.22 | 19 |
| Yes | 2.21 | 0.20 | 20 |
| Yes | 2.20 | 0.16 | 22 |
| No | 1.00 | N/A | 12 |

[0406] The results in Table 10 represent Frataxin expression values from constructs comprising CB6, CMV, or PGK promoter sequences compared to constructs comprising a wild-type frataxin promoter sequence. The values for SEQ ID NO: 12 represent expression levels in two separate experiments. The presence of a CMV or CB6 promoter had the greatest effect of enhancing the expression level of Frataxin approximately 2 fold.

TABLE 10
Effect of CB6, CMV or PGK Promoters
on Frataxin Expression In Vitro

| | Relative | Standard | SEQ |
|---|---|---|---|
| Promoter | Expression | Deviation | ID NO. |
| CB6 | 1.03 | 0.05 | 12 |
| CB6 | 1.00 | 0.09 | 12 |
| CB6 | 1.72 | 0.04 | 14 |
| CB6 | 1.88 | 0.36 | 16 |
| CB6 | 1.07 | 0.22 | 19 |
| CB6 | 2.21 | 0.20 | 20 |
| CB6 | 2.20 | 0.16 | 22 |
| CMV | 1.78 | 0.36 | 43 |
| CMV | 2.16 | 0.17 | 44 |
| CMV | 2.20 | 0.29 | 45 |
| CMV | 2.54 | 0.03 | 46 |
| CMV | 1.63 | 0.12 | 42 |
| PGK | 0.20 | N/A | 57 |
| PGK | 0.23 | N/A | 58 |
| PGK | 0.26 | N/A | 59 |
| PGK | 0.36 | N/A | 60 |
| PGK | 0.72 | N/A | 61 |
| FXN | 0.37 | N/A | 48 |
| FXN | 0.45 | N/A | 49 |
| FXN | 1.07 | N/A | 50 |
| FXN | 1.65 | N/A | 51 |
| FXN | 1.21 | N/A | 52 |

[0407] The results in Table 11 represent Frataxin expression values from pAAVsc-Promoter-SV40. The results in Table 11 represent Frataxin expression values from self-complementary AAV constructs comprising CB6, CMV, or PGK promoter sequences compared to constructs comprising a wild-type frataxin promoter sequence. The presence of a CMV promoter had the greatest effect of enhancing the expression level of Frataxin approximately 2-3 fold.

TABLE 11
Effect of CB6, CMV or PGK Promoter on Relative Expression
From pAAVsc-Promoter-SV40 Constructs in 293FT Cells

| Relative | Standard | SEQ |
|---|---|---|
| Expression | Deviation | ID NO. |
| 3.10 | 0.24 | 73 |
| 3.02 | 0.11 | 63 |
| 2.18 | 0.06 | 75 |
| 1.00 | 0.20 | 70 |
| 0.14 | 0.01 | 85 |
| 0.13 | 0.00 | 87 |
| 0.13 | 0.00 | 79 |
| 0.10 | 0.00 | 81 |
| 0.03 | N/A | 73 |

### Example 4. AAV-FXN Constructs and ELISA Assays for Detecting Frataxin Expression

[0408] AAV constructs used for this study were designed and built using standard molecular cloning techniques. FXN-tag transgenes were cloned into pAAVsc plasmid and pcDNA3.1 plasmid and the resulting clones were further sequenced to confirm the correctness of all elements such as ITRs, CBA, SV40 and FXN-tags. The pAAVsc-FXN-tag and pcDNA3.1-FXN-tag constructs were transfected to 293FT cells to confirm the expression of FXN-tag proteins. Western blotting using either anti-tag (e.g., anti-HA) or anti-frataxin antibodies confirmed that cloned frataxin-tag is expressed in 293FT cells (data not known).

[0409] ELISA assays for detecting expressed FXN-tags were also developed. A three-step sandwich ELISA assay using either anti-tag (e.g. HA, c-myc, flag) or anti-frataxin antibodies as capture antibodies was tested and the ELISA assay may be used for determining frataxin expression levels in CNS delivery studies in vivo. Each serotype was also confirmed by silver-stain-SDS page analysis. The AAV viral genome titers (either self-complementary (sc) or single stranded (ss) AAVs) are described in Table 12.

TABLE 12
AAV Viral Genome titers

| Particles | Genome | LOT NO. | Vg plasmid | Rep-Cap | Ad helper | Titer |
|---|---|---|---|---|---|---|
| AAV2-SEQ | SS | VCAV-01870 | Ald-46819 | VCPV-0136 | Ald-39062A | 0.9 × 10¹³ |
| ID NO: 90 | | | | | | |
| AAV5-SEQ | SS | VCAV-01871 | Ald-46819 | VCPV0128-1 | Ald-39062A | 1.4 × 10¹³ |
| ID NO: 90 | | | | | | |
| AAV6-SEQ | SS | VCAV-01851 | Ald-46819 | VCPV-0132 | Ald-39062A | 0.7 × 10¹³ |
| ID NO: 90 | | | | | | |
| AAV9-SEQ | SS | VCAV-02037 | Ald-48657 | Ald-44533 | Ald-29504 | 1.6 × 10¹³ |
| ID NO: 90 | | | | | | |
| AAVrh10-SEQ | SS | VCAV-01842 | Ald-46819 | VCPV-0135 | Ald-39062A | 1.1 × 10¹³ |
| ID NO: 90 | | | | | | |
| AAVDJ-SEQ | SS | VCAV-01858 | Ald-46819 | VCPI-412 | Ald-39062A | 1.0 × 10¹³ |
| ID NO: 90 | | | | | | |
| AAVDJ/8-SEQ | SS | VCAV-01888 | — | — | — | 1.3 × 10¹³ |
| ID NO: 90 | | | | | | |
| AAVrh10-SEQ | SC | VCAV-01991 | Ald-47191 | VCPV-0135 | Ald-39062A | 0.7 × 10¹³ |
| ID NO: 91 | | | | | | |

### Example 5. In Vivo Frataxin Delivery Study

### Study Design

[0410] This study is designed to compare several AAV capsids for payload delivery to the central nervous system (CNS) after direct CNS administration. A total of 160 wild type mice (male, C57BL/6), 10-12 weeks old, were divided into 11 study groups. Mice in each study group were administered an AAV (either self-complementary (sc) or single stranded (ss) AAV) as described in the study design in Table 13. The AAV genomes (either self-complementary (sc) or single stranded (ss) AAVs) with a CB promoter, described in Table 14, were formulated in Phosphate Buffered Saline (PBS), 5% Sorbitol and 0.001% F-68 (Formulation 1) or PBS and 0.001% F-68 (Formulation 2) and administered via intracerebroventricular (ICV) or intrastriatal (IS) injection.

TABLE 13
Mouse Capsid Comparison Study - Design

| Test | | | Total | | | | |
|---|---|---|---|---|---|---|---|
| Articles | AAV | AAV | Dose | | | | End of |
| (Lot No.) | construct | Genome | (VG) | Route | Formulation | n | Study |
| Vehicle | — | — | 0 | ICV | Formulation 1 | 8 | Day 56 |
| | | | | IS | Formulation 1 | 8 | Day 28 |
| VCAV-01801-B | AAV9-SEQ | SC | 5 × 10¹⁰ | ICV | Formulation 1 | 8 | Day 56 |
| | ID NO: 91 | | | IS | Formulation 1 | 8 | Day 28 |
| VCAV-01791 | AAV9-SEQ | SS | 5 × 10¹⁰ | ICV | Formulation 1 | 8 | Day 56 |
| | ID NO: 90 | | | IS | Formulation 1 | 8 | Day 28 |
| VCAV-01870 | AAV2-SEQ | SS | 5 × 10¹⁰ | ICV | Formulation 1 | 8 | Day 56 |
| | ID NO: 90 | | | IS | Formulation 1 | 8 | Day 28 |
| VCAV-01871 | AAV5-SEQ | SS | 5 × 10¹⁰ | ICV | Formulation 1 | 8 | Day 56 |
| | ID NO: 90 | | | IS | Formulation 1 | 8 | Day 28 |
| VCAV-01851 | AAV6-SEQ | SS | 5 × 10¹⁰ | ICV | Formulation 1 | 8 | Day 56 |
| | ID NO: 90 | | | IS | Formulation 1 | 8 | Day 28 |
| VCAV-01842 | AAVrh10-SEQ | SS | 5 × 10¹⁰ | ICV | Formulation 1 | 8 | Day 56 |
| | ID NO: 90 | | | IS | Formulation 1 | 8 | Day 28 |
| VCAV-01858 | AAVDJ-SEQ | SS | 5 × 10¹⁰ | ICV | Formulation 1 | 8 | Day 56 |
| | ID NO: 90 | | | IS | Formulation 1 | 8 | Day 28 |
| VCAV-01888 | AAVDJ/8-SEQ | SS | 5 × 10¹⁰ | ICV | Formulation 1 | 8 | Day 56 |
| | ID NO: 90 | | | IS | Formulation 1 | 8 | Day 28 |
| VCAV-01962-B | AAVrh10-SEQ | SC | 2 × 10⁹ | IS | Formulation 2 | 8 | Day 28 |
| | ID NO: 91 | | | | | | |
| VCAV-01962-T | AAVrh10-SEQ | SC | 5 × 10¹⁰ | IS | Formulation 2 | 8 | Day 28 |
| | ID NO: 91 | | | | | | |

TABLE 14
Mouse Capsid Comparison Study - AAV Genome Sequences

| | | | Genome |
|---|---|---|---|
| | | AAV | SEQ |
| Test article | Capsid | Genome | ID NO |
| VCAV-01801-B | AAV9 | SC | 91 |
| VCAV-01791 | AAV9 | SS | 90 |
| VCAV-01870 | AAV2 | SS | 90 |
| VCAV-01871 | AAV5 | SS | 90 |
| VCAV-01851 | AAV6 | SS | 90 |
| VCAV-01842 | AAVrh10 | SS | 90 |
| VCAV-01858 | AAVDJ | SS | 90 |
| VCAV-01888 | AAVDJ/8 | SS | 90 |
| VCAV-01962-B | AAVrh10 | SC | 91 |
| VCAV-01962-T | AAVrh10 | SC | 91 |

### In Vivo Study

[0411] The mice were given a bolus (5×10¹⁰ VG/5 ul total dose at a 1×10¹³VG/mL composition concentration) single unilateral injection (0.5 ul/min) via either intracerebroventricular (ICV) or intrastriatal (IS) administration with a Hamilton 1701 gauge 33 bevel 60 degree needle. The injection site for ICV administration was AP −0.35, ML 1.0, DV −2.5 mm from bregma and the injection site for IS administration was AP 0.5, ML −2.0, DV −4 mm from bregma. Two mm coronal slabs were prepared from the brain. Tissue at the injection site and remaining tissue from the same coronal slab, as well as adjacent slabs immediately anterior (containing frontal cortex) and posterior to the injection site, were taken for human frataxin protein quantitation using the SimpleStep human frataxin ELISA (Abcam) which is specific for human frataxin (no detection of mouse frataxin). Mouse endogenous frataxin protein levels were quantified by a different frataxin ELISA (Abcam).

### Intrastriatal Injection

[0412] Human frataxin levels in left striatum (CPuL) on day 28 following IS injection were determined using ELISA assays and the average frataxin expression (ng/mg protein) are shown in Table 15, wherein the AAV genomes are self-complementary (sc) or single stranded (ss). High human frataxin levels were observed following administration of ssAAV9-FXN, ssAAV6-FXN, and ssAAVDJ8-FXN (Lot Nos. VCAV-01791, VCAV-01851, and VCAV-01888). The self-complementary particles, scAAV9-FXN (Lot No. VCAV-01801-B) and scAAVrh10-FXN (Lot No. VCAV-01962-T) resulted in levels 3 and 14 fold higher than single-stranded ssAAV9-FXN (Lot No. VCAV-01791) and ssAAVrh10-FXN (Lot No. VCAV-01842). At the injection site, all the vectors resulted in levels greater than mouse endogenous frataxin, which was measured to be 10 ng/mg protein.

[0413] Human frataxin levels in the 2 mm brain slice immediately posterior to the injection site, on day 28 following IS injection were determined using ELISA assays and the average frataxin expression levels (ng/mg protein) are shown in Table 15 (Slab3). ssAAV9, ssAAVDJ8, and ssAAVrh10 (Lot Nos. VCAV-01791, VCAV-01888 and VCAV-01842) IS injected mice had robust expression of human frataxin in the brain, greater than 7-16 fold mouse endogenous frataxin levels, compared to the other viral particles. ssAAV5 (Lot No. VCAV-01871) and ssAAV6 (Lot No. VCAV-01851) IS injected mice resulted in moderate expression, about 2-3 fold mouse frataxin levels, compared to the other viral particles. The results also indicated that ssAAV constructs (e.g., ssAAV 9 (Lot. No. VCAV-01791) and ssAAVrh10 (Lot. No. VCAV-01842)) resulted in higher expression levels than scAAV constructs (e.g., scAAV9 (Lot No. VCAV-01801-B) and scAAVrh10 (Lot No. VCAV-01962-T)).

TABLE 15
Mouse Capsid Comparison Study - Brain Levels
of Human FXN Following IS Injection

| | | Genome | | |
|---|---|---|---|---|
| | AAV | SEQ | CPuL | Slab3 |
| Capsid | Genome | ID NO | AVG ± SEM | AVG ± SEM |
| AAV2 | SS | 90 | 52.10 ± 10.82 | 3.11 ± 0.82 |
| AAV5 | SS | 90 | 75.10 ± 19.56 | 30.80 ± 5.12 |
| AAV6 | SS | 90 | 707.71 ± 203.62 | 16.64 ± 7.06 |
| AAVDJ | SS | 90 | 95.77 ± 29.76 | 6.89 ± 1.04 |
| AAVDJ8 | SS | 90 | 395.14 ± 49.50 | 144.94 ± 18.99 |
| AAV9 | SS | 90 | 809.48 ± 80.21 | 160.89 ± 6.78 |
| AAVrh10 | SS | 90 | 293.58 ± 40.60 | 70.57 ± 16.03 |
| scAAV9 | SC | 91 | 2463.73 ± 357.92 | 4.98 ± 0.47 |
| scAAVrh10-T | SC | 91 | 4233.40 ± 535.40 | 7.71 ± 0.94 |
| scAAVrh10-B | SC | 91 | 176.11 ± 29.10 | 25.89 ± 5.61 |

| | | |
|---|---|---|
| Sorbitol formulation (background) | 0.02 ± 0.01 | 0.02 ± 0.01 |

### ICV Injection

[0414] On day 56 following ICV injection, human frataxin protein levels were measured by ELISA at the injection site (Ing. Site, Table 16) and surrounding tissue from the same 2 mm slice (Slab 2, Table 16). In addition, human frataxin protein levels were measured by ELISA in a 2 mm slice immediately anterior (containing mostly frontal cortex, Slab 1, Table 16), and in a 2 mm slice immediately posterior (Slab 3, Table 16). The AAV genomes were self-complementary (sc) or single stranded (ss). The injection of ssAAV6-FXN VCAV-01851 resulted in moderate expression at the injection site (5 fold mouse frataxin). The self-complementary vector scAAV9-FXN VCAV-01801-B resulted in high expression levels, 100 fold higher than single-stranded ssAAV9-FXN VCAV-01791. The spread of human frataxin expression following ssAAV2-FXN VCAV-01870 and ssAAV5-FXN VCAV-01871 is limited, with highest levels found at the injection site and much lower levels anterior (Slab 2) and posterior (Slab 3) to the injection site. In contrast, ssAAV9-FXN VCAV01791 and ssAAVrh10-FXN VCAV-01842 show a more consistent expression levels in the different antero-posterior samples analyzed. ssAAVDJ-FXN VCAV-1858 and ssAAVDJ8-FXN VCAV-01888 resulted in similar levels of human frataxin. Of the single-stranded vectors, ssAAV6-FXN VCAV-01851 resulted in the highest maximum and overall levels of FXN expression.

TABLE 16
Mouse Capsid Comparison Study - Brain Levels of human FXN Following ICV Injection

| | | Genome | | | | |
|---|---|---|---|---|---|---|
| | AAV | SEQ | Slab1 | Slab2 | Inj. Site | Slab3 |
| Capsid | Genome | ID NO | AVG ± SEM | AVG ± SEM | AVG ± SEM | AVG ± SEM |
| AAV2 | SS | 90 | 0.07 ± 0.01 | 0.28 ± 0.04 | 1.98 ± 0.59 | 0.18 ± 0.06 |
| AAV5 | SS | 90 | 0.13 ± 0.06 | 1.68 ± 0.89 | 47.53 ± 15.53 | 5.41 ± 1.33 |
| AAV6 | SS | 90 | 1.06 ± 0.14 | 12.52 ± 2.40 | 53.23 ± 12.28 | 23.11 ± 4.93 |
| AAVDJ | SS | 90 | 1.82 ± 0.25 | 2.80 ± 0.60 | 9.27 ± 3.32 | 0.97 ± 0.22 |
| AAVDJ8 | SS | 90 | 0.92 ± 0.34 | 0.99 ± 0.48 | 3.94 ± 2.56 | 0.31 ± 0.07 |
| AAV9 | SS | 90 | 0.60 ± 0.08 | 1.28 ± 0.61 | 1.99 ± 0.90 | 1.36 ± 1.07 |
| AAVrh10 | SS | 90 | 0.35 ± 0.05 | 0.40 ± 0.04 | 0.35 ± 0.03 | 0.17 ± 0.02 |
| AAV9 | SC | 91 | 5.52 ± 1.30 | 39.48 ± 12.40 | 197.15 ± 66.93 | 4.64 ± 1.17 |

| | | | | |
|---|---|---|---|---|
| Sorbitol formulation (background) | 0.04 ± 0.01 | 0.05 ± 0.03 | 0.06 ± 0.02 | 0.04 ± 0.02 |

### Example 6. In Vivo ICV (Lateral Ventricle) and CM (Cisterna Magna) Injection Study

[0415] To compare expression following intracerebroventrical (ICV, lateral ventricle) or intracisternal (Cisterna Magna, CM) injections, more than 18 wild type mice (C57BL/6), 7 weeks old, were administered an AAV as described in the study design in Table 17. The AAV, described in Table 18, was formulated in PBS and 0.001% F-68 and administered via intracerebroventricular (ICV, lateral ventricle) or intracisternal (CM, cisterna magna) injection.

TABLE 17
Mouse ICV vs CM Study - Design

| AAV | Dose | | | End of |
|---|---|---|---|---|
| Genome | (VG) | Route | n | Study |
| SS | 5 × 10¹⁰ | ICV | 6 | Day 28 |
| | | CM | 6 | Day 28 |
| N/A | 0 | ICV | 3 | Day 28 |
| | | CM | 3 | Day 28 |

TABLE 18
Mouse ICV vs CM - AAV Construct Sequences

| | | Genome |
|---|---|---|
| AAV | AAV | SEQ |
| Capsid | Genome | ID NO |
| rh10 | SS | 90 |

[0416] The mice were given a bolus (5×10¹⁰ VG/5 ul total dose at a 1×10¹³ VG/mL composition concentration) single unilateral injection (0.5 ul/min) via either intracerebroventricular (ICV) or intracisternal (CM) administration. 22 samples were taken for each administration group after 28 days.

[0417] On day 28, human frataxin levels in a 2 mm anterior slice containing mostly frontal cortex (Slab 1), an adjacent 2 mm slice containing striatum (Slab 2), cervical spinal cord and lumbar spinal cord were determined using the SimpleStep human frataxin ELISA assay (Abcam) specific for human frataxin protein, and the average frataxin expression levels (ng/mg protein) are shown in FIG. 1A-1D. Frataxin protein expression was higher in brain slices after ICV administration than after CM administration (FIG. 1A-1B) whereas frataxin protein expression was higher in cervical and lumbar spinal cord after CM administration than after ICV administration (FIG. 1C-1D).

### Example 7. Non-Human Primate Capsid Comparison Study of AAV Delivery Via Intrathecal Lumber (IT-L) Administration

### Animal Test System

[0418] Forty male cynomolgus monkeys (Covance, Inc., Alice, Tex.) approximately 3 to 5 years old (approximately 3 to 5 kg) were used for this study. All the animals were bred for this study only and received no other experimental treatments. The test animals were screened for neutralizing antibody titers to the viral particles that they would later be administered, to confirm seronegativity before inclusion into this study. All the screening results were recorded for each animal and each animal had an AAV antibody titer less than 1:10.

[0419] All the test animals were first quarantined for at least four weeks at the study center with daily observations.

[0420] All the animals were housed in standard animal cages in compliance with the Guide for the Care and Use of Laboratory Animals, DHHS, (NIH) No. 86-23, and the Animal Welfare Act (9 CFR 3). The animals were also provided with environmental enrichment as per AAALAC (Association for Assessment and Accreditation of Laboratory Animal Care) accredited program.

### Test Articles/Particles

[0421] Eight different AAV test articles (Test particles) encoding human frataxin (FXN) were delivered via intrathecal lumber (IT-L) implanted catheter. AAV2, AAV5, AAV6, AAV9, AAVrh10, AAVDJ and AAVDJ8 serotypes which were packaged with a transgene (FXN) under the CB6 promoter were tested and compared for distribution and level of transgene (FXN) expression in NHP spinal cord and dorsal root ganglia (DRGs). The test particles used in this study are listed in Table 19, wherein the AAV genomes are self-complementary (SC) or single stranded (SS).

TABLE 19
NHP Capsid Comparison Study - Test Articles

| | | | | Genome |
|---|---|---|---|---|
| Test | | AAV | | SEQ |
| articles | Lot No. | Capsid | Genome | ID NO. |
| 1 | VCAV-01870 | AAV2 | SS | 90 |
| 2 | VCAV-01871 | AAV5 | SS | 90 |
| 3 | VCAV-01851 | AAV6 | SS | 90 |
| 4 | VCAV-02037 | AAV9 | SS | 90 |
| 5 | VCAV-01842 | AAVrh10 | SS | 90 |
| 6 | VCAV-01858 | AAVDJ | SS | 90 |
| 7 | VCAV-01888 | AAVDJ/8 | SS | 90 |
| 8 | VCAV-01991 | AAVrh10 | SC | 91 |

[0422] The test articles comprised preparations of vector with and without sorbitol. The test articles and AAV vehicle (PBS with 0.001% F-68) were stored at the dosing concentration of 1×10¹³ vg/mL at −75° C. or below; and were thawed at room temperature on the day of administration.

### Surgery and Surgical Recovery

[0423] 38 cynomolgus monkeys (including 4 alternates) were surgically implanted with IT-L catheters following the procedures as described below.

[0424] For IT-L catheter implantation, an incision was made over the dorsal process of the lumbar spine at L4, L5, or L6. The muscle was dissected and a hemilaminectomy was made for the insertion of a polyethylene lined polyurethane open ended catheter. The catheter was then advanced to the area of the thoraco-lumbar junction. The proximal end of the catheter terminates in a low volume titanium subcutaneous access port (MIN LOVOL, Access Technologies). Proper IT-L sampling catheter placement was verified by the ability to collect CSF at surgery. The skin was closed with sutures and tissue adhesive.

[0425] Catheter patency was verified by myelogram with Isovue 300. Dosing was performed 7-14 days after surgery.

### Experimental Design

[0426] Cynomolgus monkeys (Male 3-5 years of age with an AAV antibody titer of <1:10; including 4 alternates) surgically implanted with IT catheters in the lumbar region (L1) were divided into 9 study groups and each animal was administered three 1.0 ml slow bolus injections of test article dosing solution delivered via IT catheter at 60 minute intervals (i.e. 0 minute, 60 minutes and 120 minutes on day 1 of the study) followed by 0.2 ml of AAV vehicle immediately after the third injection to flush the dose from the catheter system. Study groups are shown in the following Table 20, wherein the AAV genomes are self-complementary (SC) or single stranded (SS).

TABLE 20
NHP Capsid Comparison Study - Study Design

| | No. | | | | | Day of |
|---|---|---|---|---|---|---|
| | of an- | Test | Ge- | | Conc. | Nec- |
| Group | imals | articles | nome | Dose (vg) | (vg/ml) | ropsy |
| 1 | 2 | AAV2-SEQ | SS | 3 × 10¹³ | 1 × 10¹³ | 43 |
| | | ID NO: 90 | | | | |
| 2 | 4 | AAV5-SEQ | SS | 3 × 10¹³ | 1 × 10¹³ | 43 |
| | | ID NO: 90 | | | | |
| 3 | 4 | AAV6-SEQ | SS | 3 × 10¹³ | 1 × 10¹³ | 43 |
| | | ID NO: 90 | | | | |
| 4 | 4 | AAV9-SEQ | SS | 3 × 10¹³ | 1 × 10¹³ | 43 |
| | | ID NO: 90 | | | | |
| 5 | 4 | AAVrh10-SEQ | SS | 3 × 10¹³ | 1 × 10¹³ | 43 |
| | | ID NO: 90 | | | | |
| 6 | 4 | AAVDJ-SEQ | SS | 3 × 10¹³ | 1 × 10¹³ | 43 |
| | | ID NO: 90 | | | | |
| 7 | 4 | AAVDJ/8-SEQ | SS | 3 × 10¹³ | 1 × 10¹³ | 43 |
| | | ID NO: 90 | | | | |
| 8 | 4 | AAVrh10-SEQ | SC | 3 × 10¹³ | 1 × 10¹³ | 43 |
| | | ID NO: 91 | | | | |
| 9 | 4 | Vehicle | | N/A | N/A | 43 |

[0427] During the period of the study, in-life observations and measurements such as body weights, food consumption, clinical observations, and clinical pathology evaluations, and other observations were recorded.

[0428] No significant adverse effects were observed during the study as reported in these in-life parameters of each animal.

[0429] On Day 43, the animals were sacrificed and selected tissues harvested for bioanalytical evaluation.

### Example 8. ALT and AST Analysis of Tested Animals

[0430] Serum samples from animals treated with AAV particles that were collected on Day 1 (immediately prior to dosing), and Day 43 (just prior to necropsy) were analyzed for Alanine Aminotransferase (ALT) and Aspartate Aminotransferase (AST) levels.

[0431] In cynomolgus monkeys, the median values and reference intervals for ALT were 33 U/L and 15-64 U/L; respectively; and the median values and reference intervals for AST were 31 U/L and 20-63 U/L.

[0432] For most test articles, ALT and AST serum levels were not elevated. The AAVrh10-treated animals showed an increase in ALT and AST levels. Additional results from another NHP pilot study also indicated the scAAVrh10-FXN can induce elevation of ALT and AST in the blood. As a group, scAAVrh10 ALT values were 3-folder higher than the upper reference interval.

### Example 9. Transgene (Frataxin) mRNA Expression Analysis

[0433] Frataxin mRNA expression in all the tissues collected at necropsy as described in Example 8 was measured using q-PCR. All samples were run in duplex qRT-PCR reactions for frataxin and control mRNAs (beta-actin and GAPDH). A statistical test (Grubbs test) was used to determine single outliers values in each data set. The fold-change ratios were used to determine single outliers among replicates. For all the samples tested, rates of exclusion for replications were 5.9% of 816 spinal cord values, 4.6% of 544 DRG values, and 1.6% of 272 dentate nucleus and liver values. The absolute and relative quantification for frataxin mRNA expression by qRT-PCR were also determined.

[0434] Overall, the 8 AAV serotypes injected intrathecally led to human frataxin expression levels higher than 0.5 fold over the human brain reference control. After 6 weeks, all tested animals showed a rise in neutralizing AAV antibodies of the injected serotype in serum and in CSF.

[0435] Frataxin mRNA expression levels in the CNS and selected peripheral organs in tested monkeys after IT-L1 bolus dosing of each capsid are shown in FIG. 2A to 2H.

[0436] ssAAV2 serotype: Frataxin mRNA expression is low in dentate nucleus at 4% human brain level. The expression in spinal cord is 2.8-27.2 fold over human brain level, but no apparent rostro-caudal gradient was observed in the study. AAV2-FXN expression is variable in DRGs with about 0.025 to 1.2 fold over human brain level. In general, the AAV2-FXN expression in DRGs is lower than that in spinal cord. Similarly, the average expression level of AAV2-FXN in liver is the lowest of all AAV capsids tested, normalized to human brain levels (FIG. 2A). As compared to the other serotypes, AAV2 generates the highest average expression level of frataxin in spinal cord (n=2).

[0437] ssAAV5 serotype: Frataxin mRNA expression is third highest in dentate nucleus at 18% human brain level. The expression in spinal cord is 2.1-12.3 fold over human brain level, but no apparent rostro-caudal gradient was observed in the study. AAV5-FXN expression is variable in DRGs with about 0.43 to 15.9 fold over human brain level. The AAV5-FXN expression in liver roughly matches peak levels in the spinal cord and DRGs (FIG. 2B).

[0438] ssAAV6 serotype: Frataxin mRNA expression is low in dentate nucleus at 7% human brain level. The expression in spinal cord is 0.69-4.8 fold over human brain level, and a rostro-caudal gradient from C3 to L2 in expression was observed in the study, with levels highest at L2. The highest frataxin mRNA expression level in DRGs was detected for AAV6-FXN compared with all ssAAV treated groups. The AAV6-FXN expression in DRGs ranges from 3.1 to 54.1 fold over human brain level. DRGs show greater AAV6-FXN expression levels than in matching spinal cord segments C3, T12 and L4. Furthermore, the observed expression pattern in DRGs is similar with the matching spinal cord segments. The average expression level of AAV6-FXN in liver is high, 55.9 fold of human brain level, similar to the high levels of frataxin expression in T12 and S3 DRGs (FIG. 2C).

[0439] ssAAV9 serotype: The highest frataxin mRNA expression level in dentate nucleus was detected for ssAAV9 serotype compared with other ssAAV treated groups at 22% human brain level. The frataxin expression in spinal cord ranges from 0.32 to 0.9 fold over human brain level, and is generally consistent across spinal cord segments. The average ssAAV9-FXN expression in DRGS is similar to that in the spinal cord, but an elevated expression in S3 DRGs (n=4 animals) was detected at 13.1 fold over human brain levels. The expression pattern in DRGs is more variable than that in the spinal cord. ssAAV9 leads to the highest expression in liver of all ssAAV treated groups at 123 fold over human brain level, which exceeds all other samples in the study (FIG. 2D).

[0440] ssAAVDJ serotype: Frataxin mRNA expression in dentate nucleus is at 12% human brain level. After ssAAVDJ-FXN administration, frataxin expression peaked at T1 segments in the spinal cord with a range from 1.1 to 22.6 fold over human brain level. The expression in C3 and T12 DRGs is similar to that in the spinal cord, but the expression in L4 DRGs is about 5 fold lower than that in L4/L5 segments in the spinal cord. ssAAVDJ-FXN is expressed in liver higher than all the CNS tissues tested. The expression in liver is about 44.1 fold over human brain level (FIG. 2E).

[0441] ssAAVDJ8 serotype: Frataxin mRNA expression in dentate nucleus is low at 3% human brain level. The ssAAVDJ8-FXN expression is consistent across the spinal cord ranging from 0.93-4.6 fold over human brain level. The average expression in DRGs is consistent with the matching spinal cord segments, with a range from 0.49-0.78 in segments from C3 to L4 and 8.4 fold in S3. Similar to the ssAAVDJ serotype, ssAAVDJ8 has relatively high expression level in liver compared with other ssAAV treated groups. The expression in liver is about 60.2 fold over human brain level (FIG. 2F).

[0442] ssAAVrh10 serotype: Frataxin mRNA expression in dentate nucleus is very low. The ssAAVrh10-FXN expression in the spinal cord ranges from 0.39-14 fold over human brain level, with rostro-caudal gradient of expression across C3 to L2, with levels highest at L2. The average expression in DRGs is similar to the matching spinal cord segments and elevated in S3 segment to 30.2 fold over human brain level. This result is similar to that in ssAAVDJ8 and ssAAV9 driven transgene expression, indicating these three serotypes ssAAVrh10, ssAAVDJ8 and ssAAV9 have high transduction efficiency to the S3 segment of the spinal cord and matching DRGs. The expression in liver is about 49 fold over human brain level, slightly greater than the highest DRG level (FIG. 2G).

[0443] scAAVrh10 serotype: Frataxin mRNA expression in dentate nucleus is the highest among the tested capsid at 37% human brain level. The scAAVrh10-FXN expression is consistent across the spinal cord from C3 to L4/5, ranging from 1.5-5.6 fold over human brain level. The expression pattern across the spinal cord is more homogeneous than that of ssAAVrh10 serotype. scAAVrh10 can drive a similar level of expression as compared to the ssAAV treated groups but the level is lower than that of ssAAV2. The frataxin mRNA expression in DRGs is consistently high at all segments ranging from 30.4-127 fold over human brain level. Similarly, the expression in liver is the highest among all the tested groups at about 229 fold over human brain level, with a highest individual liver expression of 500 fold over human brain level (FIG. 2H).

### Example 10. Comparison of Transgene (Frataxin) mRNA Expression in NHPs Treated with Different Serotypes

[0444] Frataxin mRNA expression levels obtained from different tissue samples from all treated groups were further compared.

[0445] The expression levels from ssAAVrh10 and scAAVrh10 were compared. The results indicate that Frataxin expression is greatly improved in scAAVrh10 as compared to ssAAVrh10, while both viral particles show a similar average range of expression throughout the spinal cord. DRG expression in the scAAVrh10 treated animals is driven above the matching spinal cord segment expression and is more uniform across the spinal cord. There is also about 4.5 fold difference in average liver expression between scAAVrh10 and ssAAVrh10 (FIGS. 2G and 2H).

[0446] Frataxin expression profiles for each capsid serotypes in spinal cord segments and matching DRGs also show that certain serotypes result in much higher transgene expression than others. As shown in FIG. 3A, capsids, in order of highest average frataxin mRNA expression across the tested spinal cord segments, were ranked: ssAAV2 (11×)>ssAAVDJ (7×)>ssAAV5 (6×)>ssAAVrh10 (4×)>scAAVrh10 (3×)>ssAAV6 (2×)>ssAAVDJ8 (2×)>ssAAV9 (0.6×). As shown in FIG. 3B, capsids, in order of highest average frataxin mRNA expression across the tested dorsal root ganglia (DRG), were ranked: scAAVrh10 (72×)>ssAAV6 (28×)>ssAAVrh10 (9×)>ssAAV5 (6×)>ssAAVDJ (5×)>ssAAV9 (4×)>ssAAVDJ8 (3×)>ssAAV2 (0.6×).

[0447] A comparison of frataxin expression by each capsid along the rostro-caudal axis of the spinal cord reveals that most of capsids tested have similar ranges of expression in the L2 segment, one segment caudal to the L1 site for administration, with the exception of ssAAV9 which results in less than 1/10th of the expression with other capsids (FIG. 3D). The C3 segment, the most rostral segment tested, demonstrates pronounced differences in expression across capsids tested and increased animal to animal viability for several AAV serotypes, notably ssAAVDJ8 and ssAAV2 (FIG. 3C). Furthermore, the expression in C3 segment is reduced in ssAAV6 and ssAAVrh10 treated animals, and slightly reduced (or consistent) in ssAAV5, ssAAVDJ and scAAVrh10 treated animals, as compared to the expression in L2 segment. Among the tested capsids, ssAV2 has the highest overall frataxin mRNA level across all tested spinal cord segments (FIG. 3C and FIG. 3D).

[0448] A similar comparison of frataxin expression by capsids in C3 and L4 DRGs reveals that among tested DRGs, C3 and L4 show lower levels of expression in all tested capsids, as compared to the expression levels in T12 and S3 DRGs. The results also indicate that only ssAAV6 and scAAVrh10 treatments result in frataxin mRNA expression above human brain level in both tissues. Consistent levels of expression were detected in ssAAV5 and ssAAV9 DRGs, but a more variable pattern was detected in ssAAVDJ8 DRGs. In ssAAV2 and ssAAVDJ treatments, frataxin mRNA expression is reduced significantly in L4 DRGs as compared to C3 DRGs. In addition, both ssAAVrh10 and scAAVrh10 show a slight increase in frataxin expression in L4 DRGs as compared to C3 DRGs. ssAAV2 is the strongest overall performer in overall spinal cord expression, but the poorest in overall DRG expression (FIG. 3E and FIG. 3F).

[0449] Frataxin mRNA expression in dentate nucleus reflects the ability of a capsid to penetrate into the deeper brain region after intrathecal injection. The results suggest that the expression in dentate nucleus was achieved in the scAAVrh10, ssAAV9 and ssAAV5 treatment groups. ssAAVrh10 consistently resulted in the lowest levels of frataxin expression in the dentate nucleus (FIG. 4A).

[0450] Frataxin mRNA expression in liver for all tested capsids was evaluated to determine the extent of extra-CNS transduction. In most animals, frataxin expression in liver is greater than that in human brain (FIG. 4B).

### Example 11. ELISA Assay for Detecting Differential Payload Expression from Regulatory Elements in Various Cell Types

[0451] The HEK293 cell line was transfected with AAV constructs, SEQ ID Nos. 13-22, 40, 48, 54-56, 62, 63, 70, 73, 75, 79, 81, 85, 87, 92, and 93 to assay the level of expression of a Frataxin payload sequence under control of various regulatory elements in human embryonic kidney 293 (HEK 293), primary human fibroblast (FA), rat primary dorsal root ganglia (DRG) neurons (rDRG), or human induced pluripotent stem cell (iPSC) derived neural stem cells (hNSC) cell types.

[0452] HEK 293 cells were co-transfected in triplicate using FUGENE® HD reagent with each construct (0.5 μg) and the gWiz-GFP plasmid (100 ng) as an internal transfection efficiency control. The transfected 293FT cells were harvested 30-36 hours post-transfection, lysed using the THERMO SCIENTIFIC™ PIERCE™ M-PER™ Mammalian Protein Extraction Reagent, and resuspended in 200 ul of lysis buffer. Protein concentration in each of the samples was measured using the Thermo Scientific™ Pierce™ BCA™ Protein Assay.

[0453] Primary human fibroblast, HIP™ Neural Stem Cells (Human iPSC-Derived), and rat primary dorsal root ganglia (DRG) neurons (rDRG) cells were co-transfected in triplicate using Lipofectamine LTX-Plus reagent with each construct (0.5 μg) and the gWiz-GFP plasmid (100 ng) as an internal transfection efficiency control. The transfected 293FT cells were harvested 30-36 hours post-transfection, lysed using the THERMO SCIENTIFIC™ PIERCE™ M-PER™ Mammalian Protein Extraction Reagent, and resuspended in 200 ul of lysis buffer. Protein concentration in each of the samples was measured using the THERMO SCIENTIFIC™ PIERCE™ BCA™ Protein Assay.

[0454] ELISA assays for detecting expressed FXN and GFP in cell lysates were performed using the Abcam SimpleStep ELISA kit for FXN and GFP. The results in Tables 21-23 represent exogenous Frataxin expression, subtracting endogenous Frataxin, values relative to GFP. Comparison of expression levels between FXN constructs is represented by normalized Frataxin compared to reference Frataxin levels.

[0455] The results in Table 21 represent Frataxin expression values from constructs comprising hEF1α, hEF1α (cpg free), CB6, frataxin (FXN), human synapsin (hSYN), SV40, ITR or CBA promoter sequences. Expression in the ITR construct is driven only by the AAV ITR sequence without any additional promoter sequence. The constructs were expressed in human embryonic kidney 293 (HEK 293), primary human fibroblast (FA), rat primary dorsal root ganglia (DRG) neurons (rDRG), or human induced pluripotent stem cell (iPSC) derived neural stem cells (hNSC). Constructs expressing Frataxin driven by a hEF1a promoter results in highest FXN expression in primary fibroblast cells. The presence of a CpG island in the hEF1a promoter promotes FXN expression in all cell types tested compared to CpG-free hEF1a promoter.

TABLE 21
Effect of Promoter on Driving Frataxin Expression
in Various Cell Types In Vitro

| | | | | | SEQ |
|---|---|---|---|---|---|
| Promoter | HEK293 | FA | rDRG | hNSC | ID NO. |
| hEF1α (CpG free) | 0.12 | 6.36 | 0.89 | 0.37 | 55 |
| hEF1α | 1.33 | 8.67 | 1.26 | 1.12 | 56 |
| CB6 | 3.09 | 1.46 | 1.19 | 1.52 | 40 |
| FXN | 0.06 | 0.00 | 0.02 | 0.14 | 48 |
| hSYN | 0.12 | 0.03 | 0.15 | 0.16 | 54 |
| ITR | 0.03 | 0.04 | 0.02 | | 92 |
| SV40 | 0.16 | 0.44 | 0.30 | 0.33 | 62 |
| CBA | 1.00 | 1.00 | 1.00 | 1.00 | 93 |

[0456] The results in Table 22 represent Frataxin expression values from self-complementary AAV (scAAV) constructs comprising frataxin (FXN), PGK, CBA, or CMV promoter sequences expressed in primary human fibroblast (FA) cells.

[0457] The presence of a CMV promoter had the greatest effect of enhancing the expression level of Frataxin in primary fibroblast cells.

TABLE 22
Effect of Promoter on Driving Frataxin Expression
in Primary Human Fibroblast Cells In Vitro

| Frataxin | | Relative | SEQ |
|---|---|---|---|
| Sequence | Promoter | Expression | ID NO. |
| FXN | FXN | 0.05 | 79 |
| FXN | PGK | 0.05 | 85 |
| FXN | CBA | 0.14 | 63 |
| FXN | CMV | 0.49 | 73 |
| Codon Optimized FXN | FXN | 0.06 | 81 |
| Codon Optimized FXN | PGK | 0.03 | 87 |
| Codon Optimized FXN | CBA | 0.44 | 70 |
| Codon Optimized FXN | CMV | 1.06 | 75 |

[0458] The results in Table 23 represent Frataxin expression values from constructs comprising codon optimized frataxin sequences compared to a construct comprising a wild-type frataxin sequence. The constructs were expressed in human embryonic kidney 293 (HEK 293), primary human fibroblast (FA), rat primary dorsal root ganglia (DRG) neurons (rDRG), or human induced pluripotent stem cell (iPSC) derived neural stem cell (hNSC) cell types. The constructs encoding a codon-optimized FXN were observed to have higher levels of expression than native FXN in all cell types tested.

TABLE 23
Effect of Codon Optimization on Relative Frataxin Expression
from pAAVsc-Promoter-SV40 Constructs in Various Cell Types

| Relative | | | | | SEQ |
|---|---|---|---|---|---|
| Expression | HEK293 | hFibroblast | rDRG | hNSC | ID NO. |
| Opti-1 | 2.51 | 2.37 | 1.72 | 1.67 | 13 |
| Opti-2 | 3.30 | 2.58 | 2.65 | 2.71 | 14 |
| Opti-3 | 3.24 | 1.34 | 1.55 | N/A | 15 |
| Opti-4 | 2.67 | 1.64 | 2.02 | 1.20 | 16 |
| Opti-5 | 3.04 | 1.69 | 1.96 | N/A | 17 |
| Opti-6 | 3.63 | 1.65 | 1.70 | N/A | 18 |
| Opti-7 | 3.25 | 2.15 | 2.12 | 2.43 | 19 |
| Opti-8 | 2.60 | 1.93 | 2.42 | 3.99 | 20 |
| Opti-9 | 2.05 | 1.76 | 1.56 | N/A | 21 |
| Opti-10 | 2.69 | 3.04 | 2.39 | 2.60 | 22 |
| FXN | 1.00 | 1.00 | 1.00 | 1.00 | 93 |

### Example 12. Non-Human Primate Delivery Study

[0459] Non-human primates (NHPs) (n=4 Cynomolgus and n=4 Rhesus) were administered an AAV particle, serotype rh.10, containing one of the DNA constructs described in Table 24, formulated in phosphate buffered saline (PBS) with 0.001% F-68 (pluronic acid), via bolus or continuous intrathecal (IT) delivery using implanted catheters at cervical, thoracic and/or lumbar levels.

TABLE 24
Delivery Study in Non-Human Primates -
AAV Genome Sequences

| | Promoter | AAV | SEQ |
|---|---|---|---|
| Promoter | Position | Genome | ID NO |
| CBA (AKA CB6) | 535-794 | Self-Complementary | 91 |
| CB6 | 602-861 | Single-Stranded | 93 |
| CB6 | 472-736 | Self-Complementary | 94 |

[0460] The study design is shown in Table 25. Groups A and D were administered sequential 1 hour infusions at C1, T1 and L1 via a syringe pump (NE-300) at 1.5 ml/hour. Group B was administered a 10 hour infusion at L1 via an external CADD-Micro pump at 1.0 ml/hour and the NHPs were ambulatory wearing a jacket containing the pump. Group C was administered 3 bolus injections at L1 with 1 hour inter-dose intervals.

[0461] For Groups A, C and D, the NHPs were in a restrained prone position during administration. For Group D, the NHPs were returned to their cage between injections.

[0462] After the administration of the AAV construct, 200-500 ul of excipient (PBS with 0.001% F-68) was used to flush the catheter.

TABLE 25
Delivery Study in Non-Human Primates - Study Design

| | | AAV | | SEQ | | | | Conc. | Dose | N |
|---|---|---|---|---|---|---|---|---|---|---|
| Group | Capsid | Genome | Payload | ID NO | Site(s) | Rate | Vol. | (vg/ml) | (vg) | Species |
| A | AAVrh10 | SC | FXN | 91 | C1, T1, | 1.5 ml/h | 3 ml | 1 × 10¹³ | 3 × 10¹³ | 2 |
| | | | | | L1 | | | | | Rhesus |
| B | AAVrh10 | SC | FXN | 91 | L1 | 1.0 ml/h | 10 ml | 0.3 × 10¹³ | 3 × 10¹³ | 2 |
| | | | | | | | | | | Cynomolgus |
| C | AAVrh10 | SS | FXN | 93 | L1 | 3x Bolus | 3 ml | 1 × 10¹³ | 3 × 10¹³ | 2 |
| | | | | | | | | | | Cynomolgus |
| D | AAVrh10 | SC | GFP | 94 | C1, T1, | 1.5 ml/h | 3 ml | 1 × 10¹³ | 3 × 10¹³ | 2 |
| | | | | | L1 | | | | | Rhesus |

[0463] The NHPs were observed twice daily and the weights were taken weekly. Clinical pathology was done on Days 1, 3 and 29, serum antibodies were collected at day 1 and at day 29, CSF was collected prior to the study and at Day 0, 3 and 29. Three (3) weeks (for Group D) or 4 weeks (for Groups A, B and C) after AAV administration a saline perfusion was performed and the brain, spinal cord, dorsal root ganglia (DRGs), liver, spleen, heart, kidney, pancreas, ovaries and the sural nerve were collected as well as a skin biopsy.

[0464] Spinal cord cross sections were taken at cervical, thoracic and lumbar levels, and the segments were sliced into 2-3 mm thick cross sections. DRGs were collected at cervical, thoracic, lumbar and sacral levels, and the nerve roots were trimmed away prior to processing. Two mm diameter tissue punches from 3 mm thick coronal brain slices were taken from the pre-frontal cortex, motor cortex, putamen, dentate nucleus and cerebellar cortex. The level of frataxin mRNA was measured using a TaqMan two-steps real time quantitative PCR (RT-qPCR) assay. RNA extraction was performed on the tissue samples using Rneasy Plus Universal kit (Qiagen 73404). 1 (One) μg of total RNA was then reverse transcribed into single-stranded cDNA using High-Capacity cDNA Reverse Transcription Kit (Life Technology 4368813). The TaqMan gene expression assay specific for human frataxin (Hs00175940_m1) was carried in combination with either GAPDH (Rh02621745_g1), or Actin (Hs01060665_g1) in a 20 ul reaction volume.

[0465] Assays were performed in duplicate by two experimenters using a Lightcycler 480 II instrument (Roche). The amount of human frataxin mRNA for each sample was normalized to GAPDH or beta-Actin and further normalized relative to a control human brain sample. Each plate contained a No Template Control, a No Reverse Transcriptase control, a serially diluted human RNA and a serially diluted plasmid construct containing human frataxin. Amplification efficiency was determined for target and reference genes.

[0466] The relative quantity of human frataxin mRNA was averaged from four replicates and calculated according to the delta-delta Ct method (Livak and Schmittgen, 2001). The same procedure was performed to quantify eGFP mRNA using a TaqMan gene expression assay specific for eGFP (Mr04329676_mr). For eGFP, normalized Ct ratios were compared. Results for the 2 NHPs in Group A are shown in Table 26.

[0467] In Table 26, “BD” indicates that the detection of frataxin is below the lower limit of quantification of the assay. In Table 26, samples are identified using vertebral segmentation annotation.

TABLE 26
Delivery Study in Non-Human Primates, Group A - Frataxin expression
after sequential 1 hour IT infusions at C1, T1 and L1

| | | Fold Change Relative to Human Brain | |
|---|---|---|---|
| | | Frataxin Expression | |
| Sample | | NHP A1 | NHP A2 |
| Brain | Prefrontal Cortex | 4.79 | 0.05 |
| | Motor Cortex | 3.71 | BD |
| | Putamen | BD | BD |
| | Dentate Nucleus | BD | BD |
| | Cerebellar Cortex | 0.85 | 1.34 |
| Spinal Cord | C1 | 3.39 | 5.71 |
| | C3 | 3.89 | 1.91 |
| | C5 | 1.91 | 0.95 |
| | C7 | 5.44 | 0.42 |
| | T2 | 5.75 | 0.77 |
| | T4 | 7.23 | 0.92 |
| | T7 | 7.81 | 0.80 |
| | T8 | 25.39 | 2.49 |
| | T10 | 18.19 | 0.54 |
| | T12 | 21.75 | 1.91 |
| | L2 | 60.07 | 17.78 |
| DRG | C3 | 109 | 1.89 |
| | C5 | 96.67 | 1.50 |
| | T4 | 87.16 | 0.74 |
| | T7 | 15.22 | 1.23 |
| | L2 | 3.86 | 17.67 |
| | L6 | 121.10 | 13.04 |
| | S3 | 23.45 | 23.64 |

| | | |
|---|---|---|
| Liver | 156.90 | 256.20 |
| Spleen | 24.72 | 4.80 |

[0468] Frataxin expression was achieved in the pre-fontal, motor and cerebellar cortices but not the dentate nucleus. The 3-site IT infusion at C1, T1 and L1 resulted in a 31- to 42-fold spread of expression across the spinal cord. The DRGs generally showed expression greater than or equivalent to the spinal cord (with a 31- to 32-fold spread) and there was significant expression detected in the liver and spleen.

[0469] NHP A1 had a gradient of expression with the highest RNA levels in the lumbar region that were ˜30× level in human brain. Expression in the cervical region was 2-3-fold normal.

[0470] NHP A2, while showing lower expression than NHP A1, again had the highest expression (˜10-fold) in the lumbar region. The thoracic cord had the lowest level of expression, which was up to 2-fold normal.

[0471] DRG expression was similar to the spinal cord with much higher levels in NHP A1 than NHP A2. FXN expression was 10-100 fold higher than human brain levels in this f animal. NHP A2 had lower FXN expression with cervical and thoracic DRGs at levels comparable to the human brain, however the lumbar and sacral DRGs had higher levels, suggesting a preferential transduction of these lower DRGs despite infusions at multiple levels along the cord.

[0472] Results for the 2 NHPs in Group B are shown in Table 27.

[0473] In Table 27, “BD” indicates that the detection of frataxin is below the lower limit of quantification of the assay. In Table 27, samples are identified using vertebral segmentation annotation.

TABLE 27
Delivery Study in Non-Human Primates, Group B - Frataxin
expression after 10 hour IT infusion at L1

| | | Fold Change Relative to Human Brain | |
|---|---|---|---|
| | | Frataxin Expression | |
| Sample | | NHP B1 | NHP B2 |
| Brain | Prefrontal Cortex | 0.33 | BD |
| | Motor Cortex | 0.92 | BD |
| | Putamen | BD | BD |
| | Dentate Nucleus | 0.10 | 0.08 |
| | Cerebellar Cortex | 0.95 | 1.56 |
| Spinal Cord | C1 | 2.26 | 0.27 |
| | C3 | 2.43 | 1.06 |
| | C5 | 3.00 | 0.95 |
| | C7 | 5.24 | 2.20 |
| | T2 | 6.46 | 1.21 |
| | T4 | 10.31 | 7.47 |
| | T7 | 11.99 | 0.90 |
| | T8 | 15.85 | 3.61 |
| | T10 | 20.31 | 1.42 |
| | T12 | 12.23 | 2.82 |
| | L2 | 10.04 | 2.82 |
| DRG | C3 | 0.62 | 2.03 |
| | C5 | 1.00 | 2.82 |
| | T4 | 67.28 | 24.71 |
| | T7 | 0.73 | 1.13 |
| | L2 | 4.38 | 5.19 |
| | L6 | 0.46 | 19.51 |
| | S3 | 42.80 | 28.77 |

| | | |
|---|---|---|
| Liver | 416.70 | 729.00 |
| Spleen | 5.51 | 5.00 |

[0474] Frataxin expression was achieved in the pre-fontal, motor and cerebellar cortices with significant expression in the dentate nucleus. The 10 hour IT infusion at L1 resulted in a 9 to 28-fold spread of expression across the spinal cord with higher levels at thoracic and lumbar levels.

[0475] NHP B1 showed gradient of expression with highest levels (10-20 fold human brain) in the lower thoracic region rostral to the site of infusion and lower levels (˜2 fold normal) in the cervical spinal cord. NHP B2 also had a gradient of FXN expression with higher levels in the lower thoracic region and less FXN in the cervical spinal cord.

[0476] The DRGs generally showed expression greater than or equivalent to the spinal cord (with a 25- to 146-fold spread) and significant expression was detected in the liver and spleen.

[0477] Results for the 2 NHPs in Group C are shown in Table 28.

[0478] In Table 28, “BD” indicates that the detection of frataxin is below the lower limit of quantification of the assay. In Table 28, samples are identified using vertebral segmentation annotation.

TABLE 28
Delivery Study in Non-Human Primates, Group C - Frataxin
expression after IT triple bolus injection at L1

| | | Fold Change Relative to Human Brain | |
|---|---|---|---|
| | | Frataxin Expression | |
| Sample | | NHP C1 | NHP C2 |
| Brain | Prefrontal Cortex | BD | BD |
| | Motor Cortex | BD | BD |
| | Putamen | BD | BD |
| | Dentate Nucleus | 0.04 | BD |
| | Cerebellar Cortex | 0.13 | 0.11 |
| Spinal Cord | C1 | 0.78 | 0.12 |
| | C3 | 0.57 | 0.30 |
| | C5 | 0.47 | 5.51 |
| | C7 | 13.32 | 0.62 |
| | T2 | 0.71 | 0.91 |
| | T4 | 1.79 | 2.22 |
| | T7 | 2.12 | 1.11 |
| | T8 | 3.32 | 1.28 |
| | T10 | 2.38 | 1.46 |
| | T12 | 2.87 | 2.51 |
| | L2 | 4.05 | 2.66 |
| DRG | C3 | 0.15 | 0.05 |
| | C5 | 2.87 | BD |
| | T4 | 0.16 | 0.10 |
| | T7 | BD | 0.07 |
| | L2 | 0.25 | 0.21 |
| | L6 | 40.71 | 17.20 |
| | S3 | 0.31 | 4.09 |

| | | |
|---|---|---|
| Liver | 1.19 | 4.53 |
| Spleen | 0.5 | 0.35 |

[0479] Comparison of prolonged and bolus delivery approaches demonstrated that prolonged infusion yielded more homogenous levels of protein expression across the spinal cord vs. bolus dosing at one or multiple levels. There was less variability with prolonged infusion across the spinal cord. Such prolonged infusion showed no more than 2-fold variability whereas bolus infusion exhibited over 4-fold differences across the spinal cord. For the prolonged infusion, the highest spinal cord expression was observed just above (rostral) to the tip of the infusion catheter. The DRGs generally had lower expression than with multi-site infusion. In the multi-site infusion, a caudal-rostral gradient in the spinal cord was observed, despite cervical, thoracic and lumbar infusion sites. DRG expression was very high across all levels. With the lumbar bolus, a caudal-to-rostral gradient of expression in the spinal cord with variable expression in DRGs was observed.

[0480] Low levels of frataxin expression were seen in the cerebellar cortex with very low or no expression seen in the pre-frontal and motor cortices, putamen and dentate nucleus. The triple IT bolus at L1 yielded a rostral-caudal expression pattern with the highest levels seen at the lower thoracic and lumbar levels and spikes in the lower cervical region with a 28- to 46-fold spread.

[0481] The DRG expression showed greater than 100-fold spread with no detectable expression in isolated cervical/thoracic DRGs. Moderate levels of expression were seen in the liver and spleen.

[0482] As shown in Table 29, the high expresser in Group D, the GFP control, showed a transgene (GFP) mRNA expression pattern across the spinal cord that was similar to the transgene (human frataxin) mRNA expression pattern in the high expresser in Group A (NHP A1). In Table 29, samples are identified using vertebral segmentation annotation.

TABLE 29
Delivery Study in Non-Human Primates - High
Expressers in Group A and Group D after Sequential
1 hour IT infusions at C1, T1 and L1

| | |
|---|---|
| Spinal Cord | Fold Transgene Expression Relative to beta-actin |

| Segment | NHP A1 (Group A) | NHP D1 (Group D) |
|---|---|---|
| C1 | 0.03 | 0.05 |
| C5 | 0.02 | 0.08 |
| C7 | 0.05 | 0.13 |
| T2 | 0.05 | 0.14 |
| T7 | 0.07 | 0.10 |
| T10 | 0.16 | 0.15 |
| T12 | 0.19 | 0.15 |

### Example 13. Comparison of Human FXN Expression Following Intrastriatal Delivery in Mice of AAV Constructs Containing Three Different Promoters

[0483] To compare human FXN expression driven by PGK, CMV and CBA and FXN promoters, more than 93 wild type mice (C57BL/6), 6-8 weeks old, were administered an AAV with dose levels shown in Tables 30-32. The AAVs were formulated in PBS and 0.001% F-68, and 5 uL administered via intrastriatal (IS) injection. Human FXN (hFXN) protein levels in striatum were quantified after 7 days (Tables 30 and 31) or 28 days (Table 32) by ELISA with an assay (Abcam) specific for human FXN (no detection of mouse FXN).

[0484] Seven days after AAV intrastriatal administration (5E9 VG), all AAV constructs resulted in human frataxin expression. The CBA promoter drove the highest expression, followed by PGK and CMV promoters. The same rank order of promoter-driven expression (CBA>PGK>CMV) was observed with constructs expressing wild-type human frataxin (Table 30) and codon optimized human frataxin (Table 31) at 7 days post-administration. With the CBA promoter, wild-type frataxin (scAAVrh10-CBA-FXN) and codon-optimized frataxin (scAAVrh10-CBA-Opti10FXN) resulted in similar levels of human frataxin protein in the striatum at this time point (Table 31).

TABLE 30
Striatum Levels of human FXN at 7 days Following Intrastriatal
Injection of Wild-Type Frataxin Constructs

| | AAV | Dose | Inj. Site |
|---|---|---|---|
| Test Article | Genome | (VG) | AVG ± SEM |
| scAAVrh10-CBA-FXN | SC | 5 × 10⁹ | 120.1 ± 20.18 |
| scAAVrh10-CMV-FXN | SC | 5 × 10⁹ | 31.20 ± 12.18 |
| scAAVrh10-PGK-FXN | SC | 5 × 10⁹ | 55.49 ± 4.69 |
| Vehicle | — | — | 2.35 ± 1.33 |

TABLE 31
Striatum Levels of human FXN at 7 days Following Intrastriatal
Injection of Codon-Optimized Frataxin (Opti10FXN) Constructs

| | AAV | Dose | Inj. Site |
|---|---|---|---|
| Test Article | Genome | (VG) | AVG ± SEM |
| scAAVrh10-CBA-Opti10FXN | SC | 5 × 10⁹ | 64.12 ± 15.45 |
| scAAVrh10-CMV-Opti10FXN | SC | 5 × 10⁹ | 18.85 ± 3.93 |
| scAAVrh10-PGK-Opti10FXN | SC | 5 × 10⁹ | 29.96 ± 6.16 |
| scAAVrh10-CBA-FXN | SC | 5 × 10⁹ | 61.89 ± 3.77 |
| Vehicle | — | — | 2.00 ± 0.09 |

[0485] Twenty-eight days after AAV intrastriatal administration (5E8, 5E9 or 5E10 VG), all AAV constructs resulted in human frataxin expression in the striatum (Table 32). For all 3 promoters (CBA, CMV, PGK), each log increase in dose resulted in an approximately 6-8 fold increase in human frataxin protein levels in the striatum. The CBA promoter drives the highest level of expression in the striatum, followed by the CMV and PGK promoters. The rank order of promoter-driven expression (CBA>CMV>PGK) was observed at 28 days post-administration, with the CBA promoter resulting in approximately 3-fold higher levels of human FXN protein expression than the CMV promoter, and the CMV promoter resulting in approximately 3-fold higher levels of human FXN protein expression than the PGK promoter, across the dose levels used.

TABLE 32
Striatum Levels of human FXN at 28 days Following Intrastriatal
Injection of Wild-Type and Codon-Optimized Frataxin Constructs

| | AAV | Dose | Inj. Site |
|---|---|---|---|
| Test Article | Genome | (VG) | AVG ± SEM |
| scAAVrh10-CBA-FXN | SC | 5 × 10⁸ | 113.51 ± 10.32 |
| scAAVrh10-CBA-FXN | SC | 5 × 10⁹ | 748.53 ± 120.54 |
| scAAVrh10-CBA-FXN | SC | 5 × 10¹⁰ | 4915.25 ± 896.59 |
| scAAVrh10-CMV-FXN | SC | 5 × 10⁸ | 33.37 ± 4.91 |
| scAAVrh10-CMV-FXN | SC | 5 × 10⁹ | 260.67 ± 12.61 |
| scAAVrh10-CMV-FXN | SC | 5 × 10¹⁰ | 1687.10 ± 278.23 |
| scAAVrh10-PGK-FXN | SC | 5 × 10⁸ | 12.49 ± 1.02 |
| scAAVrh10-PGK-FXN | SC | 5 × 10⁹ | 79.93 ± 1.60 |
| scAAVrh10-PGK-FXN | SC | 5 × 10¹⁰ | 515.81 ± 29.32 |
| scAAVrh10-CBA-Opti10FXN | SC | 5 × 10⁹ | 777.94 ± 176.08 |
| Vehicle | | | 5.47 ± 2.76 |

[0486] While the present invention has been described at some length and with some particularity with respect to the several described embodiments, it is not intended that it should be limited to any such particulars or embodiments or any particular embodiment, but it is to be construed with references to the appended claims so as to provide the broadest possible interpretation of such claims in view of the prior art and, therefore, to effectively encompass the intended scope of the invention.

[0487] All publications, patent applications, patents, and other references mentioned herein are incorporated by reference in their entirety. In case of conflict, the present specification, including definitions, will control. In addition, section headings, the materials, methods, and examples are illustrative only and not intended to be limiting.

The application's sequence listing, which the Patent Office published only in electronic form, follows.

SEQUENCE LISTING (94 sequences)

SEQ ID NO: 1 - DNA, 6119 bp, Artificial Sequence
  Description of Artificial Sequence: Synthetic polynucleotide
gacggatcgggagatctcccgatcccctatggtgcactctcagtacaatctgctctgatgccgcatagttaagccagtatctgctccctgcttgtgtgttggaggtcgctgagtagtgcgcgagcaaaatttaagctacaacaaggcaaggcttgaccgacaattgcatgaagaatctgcttagggttaggcgttttgcgctgcttcgcgatgtacgggccagatatacgcgttgacattgattattgactagttattaatagtaatcaattacggggtcattagttcatagcccatatatggagttccgcgttacataacttacggtaaatggcccgcctggctgaccgcccaacgacccccgcccattgacgtcaataatgacgtatgttcccatagtaacgccaatagggactttccattgacgtcaatgggtggagtatttacggtaaactgcccacttggcagtacatcaagtgtatcatatgccaagtacgccccctattgacgtcaatgacggtaaatggcccgcctggcattatgcccagtacatgaccttatgggactttcctacttggcagtacatctacgtattagtcatcgctattaccatggtgatgcggttttggcagtacatcaatgggcgtggatagcggtttgactcacggggatttccaagtctccaccccattgacgtcaatgggagtttgttttggcaccaaaatcaacgggactttccaaaatgtcgtaacaactccgccccattgacgcaaatgggcggtaggcgtgtacggtgggaggtctatataagcagagctctctggctaactagagaacccactgcttactggcttatcgaaattaatacgactcactatagggagacccaagctggctagcgtttaaacttaagcttggtaccgagctcggatccatgtggactctcgggcgccgcgcagtagccggcctcctggcgtcacccagcccagcccaggcccagaccctcacccgggtcccgcggccggcagagttggccccactctgcggccgccgtggcctgcgcaccgacatcgatgcgacctgcacgccccgccgcgcaagttcgaaccaacgtggcctcaaccagatttggaatgtcaaaaagcagagtgtctatttgatgaatttgaggaaatctggaactttgggccacccaggctctctagatgagaccacctatgaaagactagcagaggaaacgctggactctttagcagagttttttgaagaccttgcagacaagccatacacgtttgaggactatgatgtctcctttgggagtggtgtcttaactgtcaaactgggtggagatctaggaacctatgtgatcaacaagcagacgccaaacaagcaaatctggctatcttctccatccagtggacctaagcgttatgactggactgggaaaaactgggtgtactcccacgacggcgtgtccctccatgagctgctggccgcagagctcactaaagccttaaaaaccaaactggacttgtcttccttggcctattccggaaaagatgctggatccgactacaaagaccatgacggtgattataaagatcatgacatcgactacaaggatgacgatgacaagggatccgaacaaaaactcatctcagaagaggatctgtagctcgagtctagagggcccgtttaaacccgctgatcagcctcgactgtgccttctagttgccagccatctgttgtttgcccctcccccgtgccttccttgaccctggaaggtgccactcccactgtcctttcctaataaaatgaggaaattgcatcgcattgtctgagtaggtgtcattctattctggggggtggggtggggcaggacagcaagggggaggattgggaagacaatagcaggcatgctggggatgcggtgggctctatggcttctgaggcggaaagaaccagctggggctctagggggtatccccacgcgccctgtagcggcgcattaagcgcggcgggtgtggtggttacgcgcagcgtgaccgctacacttgccagcgccctagcgcccgctcctttcgctttcttcccttcctttctcgccacgttcgccggctttccccgtcaagctctaaatcgggggctccctttagggttccgatttagtgctttacggcacctcgaccccaaaaaacttgattagggtgatggttcacgtagtgggccatcgccctgatagacggtttttcgccctttgacgttggagtccacgttctttaatagtggactcttgttccaaactggaacaacactcaaccctatctcggtctattcttttgatttataagggattttgccgatttcggcctattggttaaaaaatgagctgatttaacaaaaatttaacgcgaattaattctgtggaatgtgtgtcagttagggtgtggaaagtccccaggctccccagcaggcagaagtatgcaaagcatgcatctcaattagtcagcaaccaggtgtggaaagtccccaggctccccagcaggcagaagtatgcaaagcatgcatctcaattagtcagcaaccatagtcccgcccctaactccgcccatcccgcccctaactccgcccagttccgcccattctccgccccatggctgactaattttttttatttatgcagaggccgaggccgcctctgcctctgagctattccagaagtagtgaggaggcttttttggaggcctaggcttttgcaaaaagctcccgggagcttgtatatccattttcggatctgatcaagagacaggatgaggatcgtttcgcatgattgaacaagatggattgcacgcaggttctccggccgcttgggtggagaggctattcggctatgactgggcacaacagacaatcggctgctctgatgccgccgtgttccggctgtcagcgcaggggcgcccggttctttttgtcaagaccgacctgtccggtgccctgaatgaactgcaggacgaggcagcgcggctatcgtggctggccacgacgggcgttccttgcgcagctgtgctcgacgttgtcactgaagcgggaagggactggctgctattgggcgaagtgccggggcaggatctcctgtcatctcaccttgctcctgccgagaaagtatccatcatggctgatgcaatgcggcggctgcatacgcttgatccggctacctgcccattcgaccaccaagcgaaacatcgcatcgagcgagcacgtactcggatggaagccggtcttgtcgatcaggatgatctggacgaagagcatcaggggctcgcgccagccgaactgttcgccaggctcaaggcgcgcatgcccgacggcgaggatctcgtcgtgacccatggcgatgcctgcttgccgaatatcatggtggaaaatggccgcttttctggattcatcgactgtggccggctgggtgtggcggaccgctatcaggacatagcgttggctacccgtgatattgctgaagagcttggcggcgaatgggctgaccgcttcctcgtgctttacggtatcgccgctcccgattcgcagcgcatcgccttctatcgccttcttgacgagttcttctgagcgggactctggggttcgaaatgaccgaccaagcgacgcccaacctgccatcacgagatttcgattccaccgccgccttctatgaaaggttgggcttcggaatcgttttccgggacgccggctggatgatcctccagcgcggggatctcatgctggagttcttcgcccaccccaacttgtttattgcagcttataatggttacaaataaagcaatagcatcacaaatttcacaaataaagcatttttttcactgcattctagttgtggtttgtccaaactcatcaatgtatcttatcatgtctgtataccgtcgacctctagctagagcttggcgtaatcatggtcatagctgtttcctgtgtgaaattgttatccgctcacaattccacacaacatacgagccggaagcataaagtgtaaagcctggggtgcctaatgagtgagctaactcacattaattgcgttgcgctcactgcccgctttccagtcgggaaacctgtcgtgccagctgcattaatgaatcggccaacgcgcggggagaggcggtttgcgtattgggcgctcttccgcttcctcgctcactgactcgctgcgctcggtcgttcggctgcggcgagcggtatcagctcactcaaaggcggtaatacggttatccacagaatcaggggataacgcaggaaagaacatgtgagcaaaaggccagcaaaaggccaggaaccgtaaaaaggccgcgttgctggcgtttttccataggctccgcccccctgacgagcatcacaaaaatcgacgctcaagtcagaggtggcgaaacccgacaggactataaagataccaggcgtttccccctggaagctccctcgtgcgctctcctgttccgaccctgccgcttaccggatacctgtccgcctttctcccttcgggaagcgtggcgctttctcatagctcacgctgtaggtatctcagttcggtgtaggtcgttcgctccaagctgggctgtgtgcacgaaccccccgttcagcccgaccgctgcgccttatccggtaactatcgtcttgagtccaacccggtaagacacgacttatcgccactggcagcagccactggtaacaggattagcagagcgaggtatgtaggcggtgctacagagttcttgaagtggtggcctaactacggctacactagaagaacagtatttggtatctgcgctctgctgaagccagttaccttcggaaaaagagttggtagctcttgatccggcaaacaaaccaccgctggtagcggtttttttgtttgcaagcagcagattacgcgcagaaaaaaaggatctcaagaagatcctttgatcttttctacggggtctgacgctcagtggaacgaaaactcacgttaagggattttggtcatgagattatcaaaaaggatcttcacctagatccttttaaattaaaaatgaagttttaaatcaatctaaagtatatatgagtaaacttggtctgacagttaccaatgcttaatcagtgaggcacctatctcagcgatctgtctatttcgttcatccatagttgcctgactccccgtcgtgtagataactacgatacgggagggcttaccatctggccccagtgctgcaatgataccgcgagacccacgctcaccggctccagatttatcagcaataaaccagccagccggaagggccgagcgcagaagtggtcctgcaactttatccgcctccatccagtctattaattgttgccgggaagctagagtaagtagttcgccagttaatagtttgcgcaacgttgttgccattgctacaggcatcgtggtgtcacgctcgtcgtttggtatggcttcattcagctccggttcccaacgatcaaggcgagttacatgatcccccatgttgtgcaaaaaagcggttagctccttcggtcctccgatcgttgtcagaagtaagttggccgcagtgttatcactcatggttatggcagcactgcataattctcttactgtcatgccatccgtaagatgcttttctgtgactggtgagtactcaaccaagtcattctgagaatagtgtatgcggcgaccgagttgctcttgcccggcgtcaatacgggataataccgcgccacatagcagaactttaaaagtgctcatcattggaaaacgttcttcggggcgaaaactctcaaggatcttaccgctgttgagatccagttcgatgtaacccactcgtgcacccaactgatcttcagcatcttttactttcaccagcgtttctgggtgagcaaaaacaggaaggcaaaatgccgcaaaaaagggaataagggcgacacggaaatgttgaatactcatactcttcctttttcaatattattgaagcatttatcagggttattgtctcatgagcggatacatatttgaatgtatttagaaaaataaacaaataggggttccgcgcacatttccccgaaaagtgccacctgacgtc

SEQ ID NO: 2 - DNA, 6011 bp, Artificial Sequence
  Description of Artificial Sequence: Synthetic polynucleotide
gacggatcgggagatctcccgatcccctatggtgcactctcagtacaatctgctctgatgccgcatagttaagccagtatctgctccctgcttgtgtgttggaggtcgctgagtagtgcgcgagcaaaatttaagctacaacaaggcaaggcttgaccgacaattgcatgaagaatctgcttagggttaggcgttttgcgctgcttcgcgatgtacgggccagatatacgcgttgacattgattattgactagttattaatagtaatcaattacggggtcattagttcatagcccatatatggagttccgcgttacataacttacggtaaatggcccgcctggctgaccgcccaacgacccccgcccattgacgtcaataatgacgtatgttcccatagtaacgccaatagggactttccattgacgtcaatgggtggagtatttacggtaaactgcccacttggcagtacatcaagtgtatcatatgccaagtacgccccctattgacgtcaatgacggtaaatggcccgcctggcattatgcccagtacatgaccttatgggactttcctacttggcagtacatctacgtattagtcatcgctattaccatggtgatgcggttttggcagtacatcaatgggcgtggatagcggtttgactcacggggatttccaagtctccaccccattgacgtcaatgggagtttgttttggcaccaaaatcaacgggactttccaaaatgtcgtaacaactccgccccattgacgcaaatgggcggtaggcgtgtacggtgggaggtctatataagcagagctctctggctaactagagaacccactgcttactggcttatcgaaattaatacgactcactatagggagacccaagctggctagcgtttaaacttaagcttggtaccgagctcggatccatgtggactctcgggcgccgcgcagtagccggcctcctggcgtcacccagcccagcccaggcccagaccctcacccgggtcccgcggccggcagagttggccccactctgcggccgccgtggcctgcgcaccgacatcgatgcgacctgcacgccccgccgcgcaagttcgaaccaacgtggcctcaaccagatttggaatgtcaaaaagcagagtgtctatttgatgaatttgaggaaatctggaactttgggccacccaggctctctagatgagaccacctatgaaagactagcagaggaaacgctggactctttagcagagttttttgaagaccttgcagacaagccatacacgtttgaggactatgatgtctcctttgggagtggtgtcttaactgtcaaactgggtggagatctaggaacctatgtgatcaacaagcagacgccaaacaagcaaatctggctatcttctccatccagtggacctaagcgttatgactggactgggaaaaactgggtgtactcccacgacggcgtgtccctccatgagctgctggccgcagagctcactaaagccttaaaaaccaaactggacttgtcttccttggcctattccggaaaagatgcttgactcgagtctagagggcccgtttaaacccgctgatcagcctcgactgtgccttctagttgccagccatctgttgtttgcccctcccccgtgccttccttgaccctggaaggtgccactcccactgtcctttcctaataaaatgaggaaattgcatcgcattgtctgagtaggtgtcattctattctggggggtggggtggggcaggacagcaagggggaggattgggaagacaatagcaggcatgctggggatgcggtgggctctatggcttctgaggcggaaagaaccagctggggctctagggggtatccccacgcgccctgtagcggcgcattaagcgcggcgggtgtggtggttacgcgcagcgtgaccgctacacttgccagcgccctagcgcccgctcctttcgctttcttcccttcctttctcgccacgttcgccggctttccccgtcaagctctaaatcgggggctccctttagggttccgatttagtgctttacggcacctcgaccccaaaaaacttgattagggtgatggttcacgtagtgggccatcgccctgatagacggtttttcgccctttgacgttggagtccacgttctttaatagtggactcttgttccaaactggaacaacactcaaccctatctcggtctattcttttgatttataagggattttgccgatttcggcctattggttaaaaaatgagctgatttaacaaaaatttaacgcgaattaattctgtggaatgtgtgtcagttagggtgtggaaagtccccaggctccccagcaggcagaagtatgcaaagcatgcatctcaattagtcagcaaccaggtgtggaaagtccccaggctccccagcaggcagaagtatgcaaagcatgcatctcaattagtcagcaaccatagtcccgcccctaactccgcccatcccgcccctaactccgcccagttccgcccattctccgccccatggctgactaattttttttatttatgcagaggccgaggccgcctctgcctctgagctattccagaagtagtgaggaggcttttttggaggcctaggcttttgcaaaaagctcccgggagcttgtatatccattttcggatctgatcaagagacaggatgaggatcgtttcgcatgattgaacaagatggattgcacgcaggttctccggccgcttgggtggagaggctattcggctatgactgggcacaacagacaatcggctgctctgatgccgccgtgttccggctgtcagcgcaggggcgcccggttctttttgtcaagaccgacctgtccggtgccctgaatgaactgcaggacgaggcagcgcggctatcgtggctggccacgacgggcgttccttgcgcagctgtgctcgacgttgtcactgaagcgggaagggactggctgctattgggcgaagtgccggggcaggatctcctgtcatctcaccttgctcctgccgagaaagtatccatcatggctgatgcaatgcggcggctgcatacgcttgatccggctacctgcccattcgaccaccaagcgaaacatcgcatcgagcgagcacgtactcggatggaagccggtcttgtcgatcaggatgatctggacgaagagcatcaggggctcgcgccagccgaactgttcgccaggctcaaggcgcgcatgcccgacggcgaggatctcgtcgtgacccatggcgatgcctgcttgccgaatatcatggtggaaaatggccgcttttctggattcatcgactgtggccggctgggtgtggcggaccgctatcaggacatagcgttggctacccgtgatattgctgaagagcttggcggcgaatgggctgaccgcttcctcgtgctttacggtatcgccgctcccgattcgcagcgcatcgccttctatcgccttcttgacgagttcttctgagcgggactctggggttcgaaatgaccgaccaagcgacgcccaacctgccatcacgagatttcgattccaccgccgccttctatgaaaggttgggcttcggaatcgttttccgggacgccggctggatgatcctccagcgcggggatctcatgctggagttcttcgcccaccccaacttgtttattgcagcttataatggttacaaataaagcaatagcatcacaaatttcacaaataaagcatttttttcactgcattctagttgtggtttgtccaaactcatcaatgtatcttatcatgtctgtataccgtcgacctctagctagagcttggcgtaatcatggtcatagctgtttcctgtgtgaaattgttatccgctcacaattccacacaacatacgagccggaagcataaagtgtaaagcctggggtgcctaatgagtgagctaactcacattaattgcgttgcgctcactgcccgctttccagtcgggaaacctgtcgtgccagctgcattaatgaatcggccaacgcgcggggagaggcggtttgcgtattgggcgctcttccgcttcctcgctcactgactcgctgcgctcggtcgttcggctgcggcgagcggtatcagctcactcaaaggcggtaatacggttatccacagaatcaggggataacgcaggaaagaacatgtgagcaaaaggccagcaaaaggccaggaaccgtaaaaaggccgcgttgctggcgtttttccataggctccgcccccctgacgagcatcacaaaaatcgacgctcaagtcagaggtggcgaaacccgacaggactataaagataccaggcgtttccccctggaagctccctcgtgcgctctcctgttccgaccctgccgcttaccggatacctgtccgcctttctcccttcgggaagcgtggcgctttctcatagctcacgctgtaggtatctcagttcggtgtaggtcgttcgctccaagctgggctgtgtgcacgaaccccccgttcagcccgaccgctgcgccttatccggtaactatcgtcttgagtccaacccggtaagacacgacttatcgccactggcagcagccactggtaacaggattagcagagcgaggtatgtaggcggtgctacagagttcttgaagtggtggcctaactacggctacactagaagaacagtatttggtatctgcgctctgctgaagccagttaccttcggaaaaagagttggtagctcttgatccggcaaacaaaccaccgctggtagcggtttttttgtttgcaagcagcagattacgcgcagaaaaaaaggatctcaagaagatcctttgatcttttctacggggtctgacgctcagtggaacgaaaactcacgttaagggattttggtcatgagattatcaaaaaggatcttcacctagatccttttaaattaaaaatgaagttttaaatcaatctaaagtatatatgagtaaacttggtctgacagttaccaatgcttaatcagtgaggcacctatctcagcgatctgtctatttcgttcatccatagttgcctgactccccgtcgtgtagataactacgatacgggagggcttaccatctggccccagtgctgcaatgataccgcgagacccacgctcaccggctccagatttatcagcaataaaccagccagccggaagggccgagcgcagaagtggtcctgcaactttatccgcctccatccagtctattaattgttgccgggaagctagagtaagtagttcgccagttaatagtttgcgcaacgttgttgccattgctacaggcatcgtggtgtcacgctcgtcgtttggtatggcttcattcagctccggttcccaacgatcaaggcgagttacatgatcccccatgttgtgcaaaaaagcggttagctccttcggtcctccgatcgttgtcagaagtaagttggccgcagtgttatcactcatggttatggcagcactgcataattctcttactgtcatgccatccgtaagatgcttttctgtgactggtgagtactcaaccaagtcattctgagaatagtgtatgcggcgaccgagttgctcttgcccggcgtcaatacgggataataccgcgccacatagcagaactttaaaagtgctcatcattggaaaacgttcttcggggcgaaaactctcaaggatcttaccgctgttgagatccagttcgatgtaacccactcgtgcacccaactgatcttcagcatcttttactttcaccagcgtttctgggtgagcaaaaacaggaaggcaaaatgccgcaaaaaagggaataagggcgacacggaaatgttgaatactcatactcttcctttttcaatattattgaagcatttatcagggttattgtctcatgagcggatacatatttgaatgtatttagaaaaataaacaaataggggttccgcgcacatttccccgaaaagtgccacctgacgtc

SEQ ID NO: 3 - DNA, 6083 bp, Artificial Sequence
  Description of Artificial Sequence: Synthetic polynucleotide
gacggatcgggagatctcccgatcccctatggtgcactctcagtacaatctgctctgatgccgcatagttaagccagtatctgctccctgcttgtgtgttggaggtcgctgagtagtgcgcgagcaaaatttaagctacaacaaggcaaggcttgaccgacaattgcatgaagaatctgcttagggttaggcgttttgcgctgcttcgcgatgtacgggccagatatacgcgttgacattgattattgactagttattaatagtaatcaattacggggtcattagttcatagcccatatatggagttccgcgttacataacttacggtaaatggcccgcctggctgaccgcccaacgacccccgcccattgacgtcaataatgacgtatgttcccatagtaacgccaatagggactttccattgacgtcaatgggtggagtatttacggtaaactgcccacttggcagtacatcaagtgtatcatatgccaagtacgccccctattgacgtcaatgacggtaaatggcccgcctggcattatgcccagtacatgaccttatgggactttcctacttggcagtacatctacgtattagtcatcgctattaccatggtgatgcggttttggcagtacatcaatgggcgtggatagcggtttgactcacggggatttccaagtctccaccccattgacgtcaatgggagtttgttttggcaccaaaatcaacgggactttccaaaatgtcgtaacaactccgccccattgacgcaaatgggcggtaggcgtgtacggtgggaggtctatataagcagagctctctggctaactagagaacccactgcttactggcttatcgaaattaatacgactcactatagggagacccaagctggctagcgtttaaacttaagcttggtaccgagctcggatccatgtggactctcgggcgccgcgcagtagccggcctcctggcgtcacccagcccagcccaggcccagaccctcacccgggtcccgcggccggcagagttggccccactctgcggccgccgtggcctgcgcaccgacatcgatgcgacctgcacgccccgccgcgcaagttcgaaccaacgtggcctcaaccagatttggaatgtcaaaaagcagagtgtctatttgatgaatttgaggaaatctggaactttgggccacccaggctctctagatgagaccacctatgaaagactagcagaggaaacgctggactctttagcagagttttttgaagaccttgcagacaagccatacacgtttgaggactatgatgtctcctttgggagtggtgtcttaactgtcaaactgggtggagatctaggaacctatgtgatcaacaagcagacgccaaacaagcaaatctggctatcttctccatccagtggacctaagcgttatgactggactgggaaaaactgggtgtactcccacgacggcgtgtccctccatgagctgctggccgcagagctcactaaagccttaaaaaccaaactggacttgtcttccttggcctattccggaaaagatgctggatccgactacaaagaccatgacggtgattataaagatcatgacatcgactacaaggatgacgatgacaagtagctcgagtctagagggcccgtttaaacccgctgatcagcctcgactgtgccttctagttgccagccatctgttgtttgcccctcccccgtgccttccttgaccctggaaggtgccactcccactgtcctttcctaataaaatgaggaaattgcatcgcattgtctgagtaggtgtcattctattctggggggtggggtggggcaggacagcaagggggaggattgggaagacaatagcaggcatgctggggatgcggtgggctctatggcttctgaggcggaaagaaccagctggggctctagggggtatccccacgcgccctgtagcggcgcattaagcgcggcgggtgtggtggttacgcgcagcgtgaccgctacacttgccagcgccctagcgcccgctcctttcgctttcttcccttcctttctcgccacgttcgccggctttccccgtcaagctctaaatcgggggctccctttagggttccgatttagtgctttacggcacctcgaccccaaaaaacttgattagggtgatggttcacgtagtgggccatcgccctgatagacggtttttcgccctttgacgttggagtccacgttctttaatagtggactcttgttccaaactggaacaacactcaaccctatctcggtctattcttttgatttataagggattttgccgatttcggcctattggttaaaaaatgagctgatttaacaaaaatttaacgcgaattaattctgtggaatgtgtgtcagttagggtgtggaaagtccccaggctccccagcaggcagaagtatgcaaagcatgcatctcaattagtcagcaaccaggtgtggaaagtccccaggctccccagcaggcagaagtatgcaaagcatgcatctcaattagtcagcaaccatagtcccgcccctaactccgcccatcccgcccctaactccgcccagttccgcccattctccgccccatggctgactaattttttttatttatgcagaggccgaggccgcctctgcctctgagctattccagaagtagtgaggaggcttttttggaggcctaggcttttgcaaaaagctcccgggagcttgtatatccattttcggatctgatcaagagacaggatgaggatcgtttcgcatgattgaacaagatggattgcacgcaggttctccggccgcttgggtggagaggctattcggctatgactgggcacaacagacaatcggctgctctgatgccgccgtgttccggctgtcagcgcaggggcgcccggttctttttgtcaagaccgacctgtccggtgccctgaatgaactgcaggacgaggcagcgcggctatcgtggctggccacgacgggcgttccttgcgcagctgtgctcgacgttgtcactgaagcgggaagggactggctgctattgggcgaagtgccggggcaggatctcctgtcatctcaccttgctcctgccgagaaagtatccatcatggctgatgcaatgcggcggctgcatacgcttgatccggctacctgcccattcgaccaccaagcgaaacatcgcatcgagcgagcacgtactcggatggaagccggtcttgtcgatcaggatgatctggacgaagagcatcaggggctcgcgccagccgaactgttcgccaggctcaaggcgcgcatgcccgacggcgaggatctcgtcgtgacccatggcgatgcctgcttgccgaatatcatggtggaaaatggccgcttttctggattcatcgactgtggccggctgggtgtggcggaccgctatcaggacatagcgttggctacccgtgatattgctgaagagcttggcggcgaatgggctgaccgcttcctcgtgctttacggtatcgccgctcccgattcgcagcgcatcgccttctatcgccttcttgacgagttcttctgagcgggactctggggttcgaaatgaccgaccaagcgacgcccaacctgccatcacgagatttcgattccaccgccgccttctatgaaaggttgggcttcggaatcgttttccgggacgccggctggatgatcctccagcgcggggatctcatgctggagttcttcgcccaccccaacttgtttattgcagcttataatggttacaaataaagcaatagcatcacaaatttcacaaataaagcatttttttcactgcattctagttgtggtttgtccaaactcatcaatgtatcttatcatgtctgtataccgtcgacctctagctagagcttggcgtaatcatggtcatagctgtttcctgtgtgaaattgttatccgctcacaattccacacaacatacgagccggaagcataaagtgtaaagcctggggtgcctaatgagtgagctaactcacattaattgcgttgcgctcactgcccgctttccagtcgggaaacctgtcgtgccagctgcattaatgaatcggccaacgcgcggggagaggcggtttgcgtattgggcgctcttccgcttcctcgctcactgactcgctgcgctcggtcgttcggctgcggcgagcggtatcagctcactcaaaggcggtaatacggttatccacagaatcaggggataacgcaggaaagaacatgtgagcaaaaggccagcaaaaggccaggaaccgtaaaaaggccgcgttgctggcgtttttccataggctccgcccccctgacgagcatcacaaaaatcgacgctcaagtcagaggtggcgaaacccgacaggactataaagataccaggcgtttccccctggaagctccctcgtgcgctctcctgttccgaccctgccgcttaccggatacctgtccgcctttctcccttcgggaagcgtggcgctttctcatagctcacgctgtaggtatctcagttcggtgtaggtcgttcgctccaagctgggctgtgtgcacgaaccccccgttcagcccgaccgctgcgccttatccggtaactatcgtcttgagtccaacccggtaagacacgacttatcgccactggcagcagccactggtaacaggattagcagagcgaggtatgtaggcggtgctacagagttcttgaagtggtggcctaactacggctacactagaagaacagtatttggtatctgcgctctgctgaagccagttaccttcggaaaaagagttggtagctcttgatccggcaaacaaaccaccgctggtagcggtttttttgtttgcaagcagcagattacgcgcagaaaaaaaggatctcaagaagatcctttgatcttttctacggggtctgacgctcagtggaacgaaaactcacgttaagggattttggtcatgagattatcaaaaaggatcttcacctagatccttttaaattaaaaatgaagttttaaatcaatctaaagtatatatgagtaaacttggtctgacagttaccaatgcttaatcagtgaggcacctatctcagcgatctgtctatttcgttcatccatagttgcctgactccccgtcgtgtagataactacgatacgggagggcttaccatctggccccagtgctgcaatgataccgcgagacccacgctcaccggctccagatttatcagcaataaaccagccagccggaagggccgagcgcagaagtggtcctgcaactttatccgcctccatccagtctattaattgttgccgggaagctagagtaagtagttcgccagttaatagtttgcgcaacgttgttgccattgctacaggcatcgtggtgtcacgctcgtcgtttggtatggcttcattcagctccggttcccaacgatcaaggcgagttacatgatcccccatgttgtgcaaaaaagcggttagctccttcggtcctccgatcgttgtcagaagtaagttggccgcagtgttatcactcatggttatggcagcactgcataattctcttactgtcatgccatccgtaagatgcttttctgtgactggtgagtactcaaccaagtcattctgagaatagtgtatgcggcgaccgagttgctcttgcccggcgtcaatacgggataataccgcgccacatagcagaactttaaaagtgctcatcattggaaaacgttcttcggggcgaaaactctcaaggatcttaccgctgttgagatccagttcgatgtaacccactcgtgcacccaactgatcttcagcatcttttactttcaccagcgtttctgggtgagcaaaaacaggaaggcaaaatgccgcaaaaaagggaataagggcgacacggaaatgttgaatactcatactcttcctttttcaatattattgaagcatttatcagggttattgtctcatgagcggatacatatttgaatgtatttagaaaaataaacaaataggggttccgcgcacatttccccgaaaagtgccacctgacgtc

SEQ ID NO: 4 - DNA, 6119 bp, Artificial Sequence
  Description of Artificial Sequence: Synthetic polynucleotide
gacggatcgggagatctcccgatcccctatggtgcactctcagtacaatctgctctgatgccgcatagttaagccagtatctgctccctgcttgtgtgttggaggtcgctgagtagtgcgcgagcaaaatttaagctacaacaaggcaaggcttgaccgacaattgcatgaagaatctgcttagggttaggcgttttgcgctgcttcgcgatgtacgggccagatatacgcgttgacattgattattgactagttattaatagtaatcaattacggggtcattagttcatagcccatatatggagttccgcgttacataacttacggtaaatggcccgcctggctgaccgcccaacgacccccgcccattgacgtcaataatgacgtatgttcccatagtaacgccaatagggactttccattgacgtcaatgggtggagtatttacggtaaactgcccacttggcagtacatcaagtgtatcatatgccaagtacgccccctattgacgtcaatgacggtaaatggcccgcctggcattatgcccagtacatgaccttatgggactttcctacttggcagtacatctacgtattagtcatcgctattaccatggtgatgcggttttggcagtacatcaatgggcgtggatagcggtttgactcacggggatttccaagtctccaccccattgacgtcaatgggagtttgttttggcaccaaaatcaacgggactttccaaaatgtcgtaacaactccgccccattgacgcaaatgggcggtaggcgtgtacggtgggaggtctatataagcagagctctctggctaactagagaacccactgcttactggcttatcgaaattaatacgactcactatagggagacccaagctggctagcgtttaaacttaagcttggtaccgagctcggatccatgtggactctcgggcgccgcgcagtagccggcctcctggcgtcacccagcccagcccaggcccagaccctcacccgggtcccgcggccggcagagttggccccactctgcggccgccgtggcctgcgcaccgacatcgatgcgacctgcacgccccgccgcgcaagttcgaaccaacgtggcctcaaccagatttggaatgtcaaaaagcagagtgtctatttgatgaatttgaggaaatctggaactttgggccacccaggctctctagatgagaccacctatgaaagactagcagaggaaacgctggactctttagcagagttttttgaagaccttgcagacaagccatacacgtttgaggactatgatgtctcctttgggagtggtgtcttaactgtcaaactgggtggagatctaggaacctatgtgatcaacaagcagacgccaaacaagcaaatctggctatcttctccatccagtggacctaagcgttatgactggactgggaaaaactgggtgtactcccacgacggcgtgtccctccatgagctgctggccgcagagctcactaaagccttaaaaaccaaactggacttgtcttccttggcctattccggaaaagatgctggatccgaacaaaaactcatctcagaagaggatctgggatccgactacaaagaccatgacggtgattataaagatcatgacatcgactacaaggatgacgatgacaagtagctcgagtctagagggcccgtttaaacccgctgatcagcctcgactgtgccttctagttgccagccatctgttgtttgcccctcccccgtgccttccttgaccctggaaggtgccactcccactgtcctttcctaataaaatgaggaaattgcatcgcattgtctgagtaggtgtcattctattctggggggtggggtggggcaggacagcaagggggaggattgggaagacaatagcaggcatgctggggatgcggtgggctctatggcttctgaggcggaaagaaccagctggggctctagggggtatccccacgcgccctgtagcggcgcattaagcgcggcgggtgtggtggttacgcgcagcgtgaccgctacacttgccagcgccctagcgcccgctcctttcgctttcttcccttcctttctcgccacgttcgccggctttccccgtcaagctctaaatcgggggctccctttagggttccgatttagtgctttacggcacctcgaccccaaaaaacttgattagggtgatggttcacgtagtgggccatcgccctgatagacggtttttcgccctttgacgttggagtccacgttctttaatagtggactcttgttccaaactggaacaacactcaaccctatctcggtctattcttttgatttataagggattttgccgatttcggcctattggttaaaaaatgagctgatttaacaaaaatttaacgcgaattaattctgtggaatgtgtgtcagttagggtgtggaaagtccccaggctccccagcaggcagaagtatgcaaagcatgcatctcaattagtcagcaaccaggtgtggaaagtccccaggctccccagcaggcagaagtatgcaaagcatgcatctcaattagtcagcaaccatagtcccgcccctaactccgcccatcccgcccctaactccgcccagttccgcccattctccgccccatggctgactaattttttttatttatgcagaggccgaggccgcctctgcctctgagctattccagaagtagtgaggaggcttttttggaggcctaggcttttgcaaaaagctcccgggagcttgtatatccattttcggatctgatcaagagacaggatgaggatcgtttcgcatgattgaacaagatggattgcacgcaggttctccggccgcttgggtggagaggctattcggctatgactgggcacaacagacaatcggctgctctgatgccgccgtgttccggctgtcagcgcaggggcgcccggttctttttgtcaagaccgacctgtccggtgccctgaatgaactgcaggacgaggcagcgcggctatcgtggctggccacgacgggcgttccttgcgcagctgtgctcgacgttgtcactgaagcgggaagggactggctgctattgggcgaagtgccggggcaggatctcctgtcatctcaccttgctcctgccgagaaagtatccatcatggctgatgcaatgcggcggctgcatacgcttgatccggctacctgcccattcgaccaccaagcgaaacatcgcatcgagcgagcacgtactcggatggaagccggtcttgtcgatcaggatgatctggacgaagagcatcaggggctcgcgccagccgaactgttcgccaggctcaaggcgcgcatgcccgacggcgaggatctcgtcgtgacccatggcgatgcctgcttgccgaatatcatggtggaaaatggccgcttttctggattcatcgactgtggccggctgggtgtggcggaccgctatcaggacatagcgttggctacccgtgatattgctgaagagcttggcggcgaatgggctgaccgcttcctcgtgctttacggtatcgccgctcccgattcgcagcgcatcgccttctatcgccttcttgacgagttcttctgagcgggactctggggttcgaaatgaccgaccaagcgacgcccaacctgccatcacgagatttcgattccaccgccgccttctatgaaaggttgggcttcggaatcgttttccgggacgccggctggatgatcctccagcgcggggatctcatgctggagttcttcgcccaccccaacttgtttattgcagcttataatggttacaaataaagcaatagcatcacaaatttcacaaataaagcatttttttcactgcattctagttgtggtttgtccaaactcatcaatgtatcttatcatgtctgtataccgtcgacctctagctagagcttggcgtaatcatggtcatagctgtttcctgtgtgaaattgttatccgctcacaattccacacaacatacgagccggaagcataaagtgtaaagcctggggtgcctaatgagtgagctaactcacattaattgcgttgcgctcactgcccgctttccagtcgggaaacctgtcgtgccagctgcattaatgaatcggccaacgcgcggggagaggcggtttgcgtattgggcgctcttccgcttcctcgctcactgactcgctgcgctcggtcgttcggctgcggcgagcggtatcagctcactcaaaggcggtaatacggttatccacagaatcaggggataacgcaggaaagaacatgtgagcaaaaggccagcaaaaggccaggaaccgtaaaaaggccgcgttgctggcgtttttccataggctccgcccccctgacgagcatcacaaaaatcgacgctcaagtcagaggtggcgaaacccgacaggactataaagataccaggcgtttccccctggaagctccctcgtgcgctctcctgttccgaccctgccgcttaccggatacctgtccgcctttctcccttcgggaagcgtggcgctttctcatagctcacgctgtaggtatctcagttcggtgtaggtcgttcgctccaagctgggctgtgtgcacgaaccccccgttcagcccgaccgctgcgccttatccggtaactatcgtcttgagtccaacccggtaagacacgacttatcgccactggcagcagccactggtaacaggattagcagagcgaggtatgtaggcggtgctacagagttcttgaagtggtggcctaactacggctacactagaagaacagtatttggtatctgcgctctgctgaagccagttaccttcggaaaaagagttggtagctcttgatccggcaaacaaaccaccgctggtagcggtttttttgtttgcaagcagcagattacgcgcagaaaaaaaggatctcaagaagatcctttgatcttttctacggggtctgacgctcagtggaacgaaaactcacgttaagggattttggtcatgagattatcaaaaaggatcttcacctagatccttttaaattaaaaatgaagttttaaatcaatctaaagtatatatgagtaaacttggtctgacagttaccaatgcttaatcagtgaggcacctatctcagcgatctgtctatttcgttcatccatagttgcctgactccccgtcgtgtagataactacgatacgggagggcttaccatctggccccagtgctgcaatgataccgcgagacccacgctcaccggctccagatttatcagcaataaaccagccagccggaagggccgagcgcagaagtggtcctgcaactttatccgcctccatccagtctattaattgttgccgggaagctagagtaagtagttcgccagttaatagtttgcgcaacgttgttgccattgctacaggcatcgtggtgtcacgctcgtcgtttggtatggcttcattcagctccggttcccaacgatcaaggcgagttacatgatcccccatgttgtgcaaaaaagcggttagctccttcggtcctccgatcgttgtcagaagtaagttggccgcagtgttatcactcatggttatggcagcactgcataattctcttactgtcatgccatccgtaagatgcttttctgtgactggtgagtactcaaccaagtcattctgagaatagtgtatgcggcgaccgagttgctcttgcccggcgtcaatacgggataataccgcgccacatagcagaactttaaaagtgctcatcattggaaaacgttcttcggggcgaaaactctcaaggatcttaccgctgttgagatccagttcgatgtaacccactcgtgcacccaactgatcttcagcatcttttactttcaccagcgtttctgggtgagcaaaaacaggaaggcaaaatgccgcaaaaaagggaataagggcgacacggaaatgttgaatactcatactcttcctttttcaatattattgaagcatttatcagggttattgtctcatgagcggatacatatttgaatgtatttagaaaaataaacaaataggggttccgcgcacatttccccgaaaagtgccacctgacgtc

SEQ ID NO: 5 - DNA, 6041 bp, Artificial Sequence
  Description of Artificial Sequence: Synthetic polynucleotide
gacggatcgggagatctcccgatcccctatggtgcactctcagtacaatctgctctgatgccgcatagttaagccagtatctgctccctgcttgtgtgttggaggtcgctgagtagtgcgcgagcaaaatttaagctacaacaaggcaaggcttgaccgacaattgcatgaagaatctgcttagggttaggcgttttgcgctgcttcgcgatgtacgggccagatatacgcgttgacattgattattgactagttattaatagtaatcaattacggggtcattagttcatagcccatatatggagttccgcgttacataacttacggtaaatggcccgcctggctgaccgcccaacgacccccgcccattgacgtcaataatgacgtatgttcccatagtaacgccaatagggactttccattgacgtcaatgggtggagtatttacggtaaactgcccacttggcagtacatcaagtgtatcatatgccaagtacgccccctattgacgtcaatgacggtaaatggcccgcctggcattatgcccagtacatgaccttatgggactttcctacttggcagtacatctacgtattagtcatcgctattaccatggtgatgcggttttggcagtacatcaatgggcgtggatagcggtttgactcacggggatttccaagtctccaccccattgacgtcaatgggagtttgttttggcaccaaaatcaacgggactttccaaaatgtcgtaacaactccgccccattgacgcaaatgggcggtaggcgtgtacggtgggaggtctatataagcagagctctctggctaactagagaacccactgcttactggcttatcgaaattaatacgactcactatagggagacccaagctggctagcgtttaaacttaagcttggtaccgagctcggatccatgtggactctcgggcgccgcgcagtagccggcctcctggcgtcacccagcccagcccaggcccagaccctcacccgggtcccgcggccggcagagttggccccactctgcggccgccgtggcctgcgcaccgacatcgatgcgacctgcacgccccgccgcgcaagttcgaaccaacgtggcctcaaccagatttggaatgtcaaaaagcagagtgtctatttgatgaatttgaggaaatctggaactttgggccacccaggctctctagatgagaccacctatgaaagactagcagaggaaacgctggactctttagcagagttttttgaagaccttgcagacaagccatacacgtttgaggactatgatgtctcctttgggagtggtgtcttaactgtcaaactgggtggagatctaggaacctatgtgatcaacaagcagacgccaaacaagcaaatctggctatcttctccatccagtggacctaagcgttatgactggactgggaaaaactgggtgtactcccacgacggcgtgtccctccatgagctgctggccgcagagctcactaaagccttaaaaaccaaactggacttgtcttccttggcctattccggaaaagatgctgaacaaaaactcatctcagaagaggatctgtagctcgagtctagagggcccgtttaaacccgctgatcagcctcgactgtgccttctagttgccagccatctgttgtttgcccctcccccgtgccttccttgaccctggaaggtgccactcccactgtcctttcctaataaaatgaggaaattgcatcgcattgtctgagtaggtgtcattctattctggggggtggggtggggcaggacagcaagggggaggattgggaagacaatagcaggcatgctggggatgcggtgggctctatggcttctgaggcggaaagaaccagctggggctctagggggtatccccacgcgccctgtagcggcgcattaagcgcggcgggtgtggtggttacgcgcagcgtgaccgctacacttgccagcgccctagcgcccgctcctttcgctttcttcccttcctttctcgccacgttcgccggctttccccgtcaagctctaaatcgggggctccctttagggttccgatttagtgctttacggcacctcgaccccaaaaaacttgattagggtgatggttcacgtagtgggccatcgccctgatagacggtttttcgccctttgacgttggagtccacgttctttaatagtggactcttgttccaaactggaacaacactcaaccctatctcggtctattcttttgatttataagggattttgccgatttcggcctattggttaaaaaatgagctgatttaacaaaaatttaacgcgaattaattctgtggaatgtgtgtcagttagggtgtggaaagtccccaggctccccagcaggcagaagtatgcaaagcatgcatctcaattagtcagcaaccaggtgtggaaagtccccaggctccccagcaggcagaagtatgcaaagcatgcatctcaattagtcagcaaccatagtcccgcccctaactccgcccatcccgcccctaactccgcccagttccgcccattctccgccccatggctgactaattttttttatttatgcagaggccgaggccgcctctgcctctgagctattccagaagtagtgaggaggcttttttggaggcctaggcttttgcaaaaagctcccgggagcttgtatatccattttcggatctgatcaagagacaggatgaggatcgtttcgcatgattgaacaagatggattgcacgcaggttctccggccgcttgggtggagaggctattcggctatgactgggcacaacagacaatcggctgctctgatgccgccgtgttccggctgtcagcgcaggggcgcccggttctttttgtcaagaccgacctgtccggtgccctgaatgaactgcaggacgaggcagcgcggctatcgtggctggccacgacgggcgttccttgcgcagctgtgctcgacgttgtcactgaagcgggaagggactggctgctattgggcgaagtgccggggcaggatctcctgtcatctcaccttgctcctgccgagaaagtatccatcatggctgatgcaatgcggcggctgcatacgcttgatccggctacctgcccattcgaccaccaagcgaaacatcgcatcgagcgagcacgtactcggatggaagccggtcttgtcgatcaggatgatctggacgaagagcatcaggggctcgcgccagccgaactgttcgccaggctcaaggcgcgcatgcccgacggcgaggatctcgtcgtgacccatggcgatgcctgcttgccgaatatcatggtggaaaatggccgcttttctggattcatcgactgtggccggctgggtgtggcggaccgctatcaggacatagcgttggctacccgtgatattgctgaagagcttggcggcgaatgggctgaccgcttcctcgtgctttacggtatcgccgctcccgattcgcagcgcatcgccttctatcgccttcttgacgagttcttctgagcgggactctggggttcgaaatgaccgaccaagcgacgcccaacctgccatcacgagatttcgattccaccgccgccttctatgaaaggttgggcttcggaatcgttttccgggacgccggctggatgatcctccagcgcggggatctcatgctggagttcttcgcccaccccaacttgtttattgcagcttataatggttacaaataaagcaatagcatcacaaatttcacaaataaagcatttttttcactgcattctagttgtggtttgtccaaactcatcaatgtatcttatcatgtctgtataccgtcgacctctagctagagcttggcgtaatcatggtcatagctgtttcctgtgtgaaattgttatccgctcacaattccacacaacatacgagccggaagcataaagtgtaaagcctggggtgcctaatgagtgagctaactcacattaattgcgttgcgctcactgcccgctttccagtcgggaaacctgtcgtgccagctgcattaatgaatcggccaacgcgcggggagaggcggtttgcgtattgggcgctcttccgcttcctcgctcactgactcgctgcgctcggtcgttcggctgcggcgagcggtatcagctcactcaaaggcggtaatacggttatccacagaatcaggggataacgcaggaaagaacatgtgagcaaaaggccagcaaaaggccaggaaccgtaaaaaggccgcgttgctggcgtttttccataggctccgcccccctgacgagcatcacaaaaatcgacgctcaagtcagaggtggcgaaacccgacaggactataaagataccaggcgtttccccctggaagctccctcgtgcgctctcctgttccgaccctgccgcttaccggatacctgtccgcctttctcccttcgggaagcgtggcgctttctcatagctcacgctgtaggtatctcagttcggtgtaggtcgttcgctccaagctgggctgtgtgcacgaaccccccgttcagcccgaccgctgcgccttatccggtaactatcgtcttgagtccaacccggtaagacacgacttatcgccactggcagcagccactggtaacaggattagcagagcgaggtatgtaggcggtgctacagagttcttgaagtggtggcctaactacggctacactagaagaacagtatttggtatctgcgctctgctgaagccagttaccttcggaaaaagagttggtagctcttgatccggcaaacaaaccaccgctggtagcggtttttttgtttgcaagcagcagattacgcgcagaaaaaaaggatctcaagaagatcctttgatcttttctacggggtctgacgctcagtggaacgaaaactcacgttaagggattttggtcatgagattatcaaaaaggatcttcacctagatccttttaaattaaaaatgaagttttaaatcaatctaaagtatatatgagtaaacttggtctgacagttaccaatgcttaatcagtgaggcacctatctcagcgatctgtctatttcgttcatccatagttgcctgactccccgtcgtgtagataactacgatacgggagggcttaccatctggccccagtgctgcaatgataccgcgagacccacgctcaccggctccagatttatcagcaataaaccagccagccggaagggccgagcgcagaagtggtcctgcaactttatccgcctccatccagtctattaattgttgccgggaagctagagtaagtagttcgccagttaatagtttgcgcaacgttgttgccattgctacaggcatcgtggtgtcacgctcgtcgtttggtatggcttcattcagctccggttcccaacgatcaaggcgagttacatgatcccccatgttgtgcaaaaaagcggttagctccttcggtcctccgatcgttgtcagaagtaagttggccgcagtgttatcactcatggttatggcagcactgcataattctcttactgtcatgccatccgtaagatgcttttctgtgactggtgagtactcaaccaagtcattctgagaatagtgtatgcggcgaccgagttgctcttgcccggcgtcaatacgggataataccgcgccacatagcagaactttaaaagtgctcatcattggaaaacgttcttcggggcgaaaactctcaaggatcttaccgctgttgagatccagttcgatgtaacccactcgtgcacccaactgatcttcagcatcttttactttcaccagcgtttctgggtgagcaaaaacaggaaggcaaaatgccgcaaaaaagggaataagggcgacacggaaatgttgaatactcatactcttcctttttcaatattattgaagcatttatcagggttattgtctcatgagcggatacatatttgaatgtatttagaaaaataaacaaataggggttccgcgcacatttccccgaaaagtgccacctgacgtc

SEQ ID NO: 6 - DNA, 6053 bp, Artificial Sequence
  Description of Artificial Sequence: Synthetic polynucleotide
gacggatcgggagatctcccgatcccctatggtgcactctcagtacaatctgctctgatgccgcatagttaagccagtatctgctccctgcttgtgtgttggaggtcgctgagtagtgcgcgagcaaaatttaagctacaacaaggcaaggcttgaccgacaattgcatgaagaatctgcttagggttaggcgttttgcgctgcttcgcgatgtacgggccagatatacgcgttgacattgattattgactagttattaatagtaatcaattacggggtcattagttcatagcccatatatggagttccgcgttacataacttacggtaaatggcccgcctggctgaccgcccaacgacccccgcccattgacgtcaataatgacgtatgttcccatagtaacgccaatagggactttccattgacgtcaatgggtggagtatttacggtaaactgcccacttggcagtacatcaagtgtatcatatgccaagtacgccccctattgacgtcaatgacggtaaatggcccgcctggcattatgcccagtacatgaccttatgggactttcctacttggcagtacatctacgtattagtcatcgctattaccatggtgatgcggttttggcagtacatcaatgggcgtggatagcggtttgactcacggggatttccaagtctccaccccattgacgtcaatgggagtttgttttggcaccaaaatcaacgggactttccaaaatgtcgtaacaactccgccccattgacgcaaatgggcggtaggcgtgtacggtgggaggtctatataagcagagctctctggctaactagagaacccactgcttactggcttatcgaaattaatacgactcactatagggagacccaagctggctagcgtttaaacttaagcttggtaccgagctcggatccatgtggactctcgggcgccgcgcagtagccggcctcctggcgtcacccagcccagcccaggcccagaccctcacccgggtcccgcggccggcagagttggccccactctgcggccgccgtggcctgcgcaccgacatcgatgcgacctgcacgccccgccgcgcaagttcgaaccaacgtggcctcaaccagatttggaatgtcaaaaagcagagtgtctatttgatgaatttgaggaaatctggaactttgggccacccaggctctctagatgagaccacctatgaaagactagcagaggaaacgctggactctttagcagagttttttgaagaccttgcagacaagccatacacgtttgaggactatgatgtctcctttgggagtggtgtcttaactgtcaaactgggtggagatctaggaacctatgtgatcaacaagcagacgccaaacaagcaaatctggctatcttctccatccagtggacctaagcgttatgactggactgggaaaaactgggtgtactcccacgacggcgtgtccctccatgagctgctggccgcagagctcactaaagccttaaaaaccaaactggacttgtcttccttggcctattccggaaaagatgcttatccttatgacgtgcctgactatgccagcctgggaggaccttgactcgagtctagagggcccgtttaaacccgctgatcagcctcgactgtgccttctagttgccagccatctgttgtttgcccctcccccgtgccttccttgaccctggaaggtgccactcccactgtcctttcctaataaaatgaggaaattgcatcgcattgtctgagtaggtgtcattctattctggggggtggggtggggcaggacagcaagggggaggattgggaagacaatagcaggcatgctggggatgcggtgggctctatggcttctgaggcggaaagaaccagctggggctctagggggtatccccacgcgccctgtagcggcgcattaagcgcggcgggtgtggtggttacgcgcagcgtgaccgctacacttgccagcgccctagcgcccgctcctttcgctttcttcccttcctttctcgccacgttcgccggctttccccgtcaagctctaaatcgggggctccctttagggttccgatttagtgctttacggcacctcgaccccaaaaaacttgattagggtgatggttcacgtagtgggccatcgccctgatagacggtttttcgccctttgacgttggagtccacgttctttaatagtggactcttgttccaaactggaacaacactcaaccctatctcggtctattcttttgatttataagggattttgccgatttcggcctattggttaaaaaatgagctgatttaacaaaaatttaacgcgaattaattctgtggaatgtgtgtcagttagggtgtggaaagtccccaggctccccagcaggcagaagtatgcaaagcatgcatctcaattagtcagcaaccaggtgtggaaagtccccaggctccccagcaggcagaagtatgcaaagcatgcatctcaattagtcagcaaccatagtcccgcccctaactccgcccatcccgcccctaactccgcccagttccgcccattctccgccccatggctgactaattttttttatttatgcagaggccgaggccgcctctgcctctgagctattccagaagtagtgaggaggcttttttggaggcctaggcttttgcaaaaagctcccgggagcttgtatatccattttcggatctgatcaagagacaggatgaggatcgtttcgcatgattgaacaagatggattgcacgcaggttctccggccgcttgggtggagaggctattcggctatgactgggcacaacagacaatcggctgctctgatgccgccgtgttccggctgtcagcgcaggggcgcccggttctttttgtcaagaccgacctgtccggtgccctgaatgaactgcaggacgaggcagcgcggctatcgtggctggccacgacgggcgttccttgcgcagctgtgctcgacgttgtcactgaagcgggaagggactggctgctattgggcgaagtgccggggcaggatctcctgtcatctcaccttgctcctgccgagaaagtatccatcatggctgatgcaatgcggcggctgcatacgcttgatccggctacctgcccattcgaccaccaagcgaaacatcgcatcgagcgagcacgtactcggatggaagccggtcttgtcgatcaggatgatctggacgaagagcatcaggggctcgcgccagccgaactgttcgccaggctcaaggcgcgcatgcccgacggcgaggatctcgtcgtgacccatggcgatgcctgcttgccgaatatcatggtggaaaatggccgcttttctggattcatcgactgtggccggctgggtgtggcggaccgctatcaggacatagcgttggctacccgtgatattgctgaagagcttggcggcgaatgggctgaccgcttcctcgtgctttacggtatcgccgctcccgattcgcagcgcatcgccttctatcgccttcttgacgagttcttctgagcgggactctggggttcgaaatgaccgaccaagcgacgcccaacctgccatcacgagatttcgattccaccgccgccttctatgaaaggttgggcttcggaatcgttttccgggacgccggctggatgatcctccagcgcggggatctcatgctggagttcttcgcccaccccaacttgtttattgcagcttataatggttacaaataaagcaatagcatcacaaatttcacaaataaagcatttttttcactgcattctagttgtggtttgtccaaactcatcaatgtatcttatcatgtctgtataccgtcgacctctagctagagcttggcgtaatcatggtcatagctgtttcctgtgtgaaattgttatccgctcacaattccacacaacatacgagccggaagcataaagtgtaaagcctggggtgcctaatgagtgagctaactcacattaattgcgttgcgctcactgcccgctttccagtcgggaaacctgtcgtgccagctgcattaatgaatcggccaacgcgcggggagaggcggtttgcgtattgggcgctcttccgcttcctcgctcactgactcgctgcgctcggtcgttcggctgcggcgagcggtatcagctcactcaaaggcggtaatacggttatccacagaatcaggggataacgcaggaaagaacatgtgagcaaaaggccagcaaaaggccaggaaccgtaaaaaggccgcgttgctggcgtttttccataggctccgcccccctgacgagcatcacaaaaatcgacgctcaagtcagaggtggcgaaacccgacaggactataaagataccaggcgtttccccctggaagctccctcgtgcgctctcctgttccgaccctgccgcttaccggatacctgtccgcctttctcccttcgggaagcgtggcgctttctcatagctcacgctgtaggtatctcagttcggtgtaggtcgttcgctccaagctgggctgtgtgcacgaaccccccgttcagcccgaccgctgcgccttatccggtaactatcgtcttgagtccaacccggtaagacacgacttatcgccactggcagcagccactggtaacaggattagcagagcgaggtatgtaggcggtgctacagagttcttgaagtggtggcctaactacggctacactagaagaacagtatttggtatctgcgctctgctgaagccagttaccttcggaaaaagagttggtagctcttgatccggcaaacaaaccaccgctggtagcggtttttttgtttgcaagcagcagattacgcgcagaaaaaaaggatctcaagaagatcctttgatcttttctacggggtctgacgctcagtggaacgaaaactcacgttaagggattttggtcatgagattatcaaaaaggatcttcacctagatccttttaaattaaaaatgaagttttaaatcaatctaaagtatatatgagtaaacttggtctgacagttaccaatgcttaatcagtgaggcacctatctcagcgatctgtctatttcgttcatccatagttgcctgactccccgtcgtgtagataactacgatacgggagggcttaccatctggccccagtgctgcaatgataccgcgagacccacgctcaccggctccagatttatcagcaataaaccagccagccggaagggccgagcgcagaagtggtcctgcaactttatccgcctccatccagtctattaattgttgccgggaagctagagtaagtagttcgccagttaatagtttgcgcaacgttgttgccattgctacaggcatcgtggtgtcacgctcgtcgtttggtatggcttcattcagctccggttcccaacgatcaaggcgagttacatgatcccccatgttgtgcaaaaaagcggttagctccttcggtcctccgatcgttgtcagaagtaagttggccgcagtgttatcactcatggttatggcagcactgcataattctcttactgtcatgccatccgtaagatgcttttctgtgactggtgagtactcaaccaagtcattctgagaatagtgtatgcggcgaccgagttgctcttgcccggcgtcaatacgggataataccgcgccacatagcagaactttaaaagtgctcatcattggaaaacgttcttcggggcgaaaactctcaaggatcttaccgctgttgagatccagttcgatgtaacccactcgtgcacccaactgatcttcagcatcttttactttcaccagcgtttctgggtgagcaaaaacaggaaggcaaaatgccgcaaaaaagggaataagggcgacacggaaatgttgaatactcatactcttcctttttcaatattattgaagcatttatcagggttattgtctcatgagcggatacatatttgaatgtatttagaaaaataaacaaataggggttccgcgcacatttccccgaaaagtgccacctgacgtc

SEQ ID NO: 7 - DNA, 6038 bp, Artificial Sequence
  Description of Artificial Sequence: Synthetic polynucleotide
gacggatcgggagatctcccgatcccctatggtgcactctcagtacaatctgctctgatgccgcatagttaagccagtatctgctccctgcttgtgtgttggaggtcgctgagtagtgcgcgagcaaaatttaagctacaacaaggcaaggcttgaccgacaattgcatgaagaatctgcttagggttaggcgttttgcgctgcttcgcgatgtacgggccagatatacgcgttgacattgattattgactagttattaatagtaatcaattacggggtcattagttcatagcccatatatggagttccgcgttacataacttacggtaaatggcccgcctggctgaccgcccaacgacccccgcccattgacgtcaataatgacgtatgttcccatagtaacgccaatagggactttccattgacgtcaatgggtggagtatttacggtaaactgcccacttggcagtacatcaagtgtatcatatgccaagtacgccccctattgacgtcaatgacggtaaatggcccgcctggcattatgcccagtacatgaccttatgggactttcctacttggcagtacatctacgtattagtcatcgctattaccatggtgatgcggttttggcagtacatcaatgggcgtggatagcggtttgactcacggggatttccaagtctccaccccattgacgtcaatgggagtttgttttggcaccaaaatcaacgggactttccaaaatgtcgtaacaactccgccccattgacgcaaatgggcggtaggcgtgtacggtgggaggtctatataagcagagctctctggctaactagagaacccactgcttactggcttatcgaaattaatacgactcactatagggagacccaagctggctagcgtttaaacttaagcttggtaccgagctcggatccatgtggactctcgggcgccgcgcagtagccggcctcctggcgtcacccagcccagcccaggcccagaccctcacccgggtcccgcggccggcagagttggccccactctgcggccgccgtggcctgcgcaccgacatcgatgcgacctgcacgccccgccgcgcaagttcgaaccaacgtggcctcaaccagatttggaatgtcaaaaagcagagtgtctatttgatgaatttgaggaaatctggaactttgggccacccaggctctctagatgagaccacctatgaaagactagcagaggaaacgctggactctttagcagagttttttgaagaccttgcagacaagccatacacgtttgaggactatgatgtctcctttgggagtggtgtcttaactgtcaaactgggtggagatctaggaacctatgtgatcaacaagcagacgccaaacaagcaaatctggctatcttctccatccagtggacctaagcgttatgactggactgggaaaaactgggtgtactcccacgacggcgtgtccctccatgagctgctggccgcagagctcactaaagccttaaaaaccaaactggacttgtcttccttggcctattccggaaaagatgcttatccttatgacgtgcctgactatgcctgactcgagtctagagggcccgtttaaacccgctgatcagcctcgactgtgccttctagttgccagccatctgttgtttgcccctcccccgtgccttccttgaccctggaaggtgccactcccactgtcctttcctaataaaatgaggaaattgcatcgcattgtctgagtaggtgtcattctattctggggggtggggtggggcaggacagcaagggggaggattgggaagacaatagcaggcatgctggggatgcggtgggctctatggcttctgaggcggaaagaaccagctggggctctagggggtatccccacgcgccctgtagcggcgcattaagcgcggcgggtgtggtggttacgcgcagcgtgaccgctacacttgccagcgccctagcgcccgctcctttcgctttcttcccttcctttctcgccacgttcgccggctttccccgtcaagctctaaatcgggggctccctttagggttccgatttagtgctttacggcacctcgaccccaaaaaacttgattagggtgatggttcacgtagtgggccatcgccctgatagacggtttttcgccctttgacgttggagtccacgttctttaatagtggactcttgttccaaactggaacaacactcaaccctatctcggtctattcttttgatttataagggattttgccgatttcggcctattggttaaaaaatgagctgatttaacaaaaatttaacgcgaattaattctgtggaatgtgtgtcagttagggtgtggaaagtccccaggctccccagcaggcagaagtatgcaaagcatgcatctcaattagtcagcaaccaggtgtggaaagtccccaggctccccagcaggcagaagtatgcaaagcatgcatctcaattagtcagcaaccatagtcccgcccctaactccgcccatcccgcccctaactccgcccagttccgcccattctccgccccatggctgactaattttttttatttatgcagaggccgaggccgcctctgcctctgagctattccagaagtagtgaggaggcttttttggaggcctaggcttttgcaaaaagctcccgggagcttgtatatccattttcggatctgatcaagagacaggatgaggatcgtttcgcatgattgaacaagatggattgcacgcaggttctccggccgcttgggtggagaggctattcggctatgactgggcacaacagacaatcggctgctctgatgccgccgtgttccggctgtcagcgcaggggcgcccggttctttttgtcaagaccgacctgtccggtgccctgaatgaactgcaggacgaggcagcgcggctatcgtggctggccacgacgggcgttccttgcgcagctgtgctcgacgttgtcactgaagcgggaagggactggctgctattgggcgaagtgccggggcaggatctcctgtcatctcaccttgctcctgccgagaaagtatccatcatggctgatgcaatgcggcggctgcatacgcttgatccggctacctgcccattcgaccaccaagcgaaacatcgcatcgagcgagcacgtactcggatggaagccggtcttgtcgatcaggatgatctggacgaagagcatcaggggctcgcgccagccgaactgttcgccaggctcaaggcgcgcatgcccgacggcgaggatctcgtcgtgacccatggcgatgcctgcttgccgaatatcatggtggaaaatggccgcttttctggattcatcgactgtggccggctgggtgtggcggaccgctatcaggacatagcgttggctacccgtgatattgctgaagagcttggcggcgaatgggctgaccgcttcctcgtgctttacggtatcgccgctcccgattcgcagcgcatcgccttctatcgccttcttgacgagttcttctgagcgggactctggggttcgaaatgaccgaccaagcgacgcccaacctgccatcacgagatttcgattccaccgccgccttctatgaaaggttgggcttcggaatcgttttccgggacgccggctggatgatcctccagcgcggggatctcatgctggagttcttcgcccaccccaacttgtttattgcagcttataatggttacaaataaagcaatagcatcacaaatttcacaaataaagcatttttttcactgcattctagttgtggtttgtccaaactcatcaatgtatcttatcatgtctgtataccgtcgacctctagctagagcttggcgtaatcatggtcatagctgtttcctgtgtgaaattgttatccgctcacaattccacacaacatacgagccggaagcataaagtgtaaagcctggggtgcctaatgagtgagctaactcacattaattgcgttgcgctcactgcccgctttccagtcgggaaacctgtcgtgccagctgcattaatgaatcggccaacgcgcggggagaggcggtttgcgtattgggcgctcttccgcttcctcgctcactgactcgctgcgctcggtcgttcggctgcggcgagcggtatcagctcactcaaaggcggtaatacggttatccacagaatcaggggataacgcaggaaagaacatgtgagcaaaaggccagcaaaaggccaggaaccgtaaaaaggccgcgttgctggcgtttttccataggctccgcccccctgacgagcatcacaaaaatcgacgctcaagtcagaggtggcgaaacccgacaggactataaagataccaggcgtttccccctggaagctccctcgtgcgctctcctgttccgaccctgccgcttaccggatacctgtccgcctttctcccttcgggaagcgtggcgctttctcatagctcacgctgtaggtatctcagttcggtgtaggtcgttcgctccaagctgggctgtgtgcacgaaccccccgttcagcccgaccgctgcgccttatccggtaactatcgtcttgagtccaacccggtaagacacgacttatcgccactggcagcagccactggtaacaggattagcagagcgaggtatgtaggcggtgctacagagttcttgaagtggtggcctaactacggctacactagaagaacagtatttggtatctgcgctctgctgaagccagttaccttcggaaaaagagttggtagctcttgatccggcaaacaaaccaccgctggtagcggtttttttgtttgcaagcagcagattacgcgcagaaaaaaaggatctcaagaagatcctttgatcttttctacggggtctgacgctcagtggaacgaaaactcacgttaagggattttggtcatgagattatcaaaaaggatcttcacctagatccttttaaattaaaaatgaagttttaaatcaatctaaagtatatatgagtaaacttggtctgacagttaccaatgcttaatcagtgaggcacctatctcagcgatctgtctatttcgttcatccatagttgcctgactccccgtcgtgtagataactacgatacgggagggcttaccatctggccccagtgctgcaatgataccgcgagacccacgctcaccggctccagatttatcagcaataaaccagccagccggaagggccgagcgcagaagtggtcctgcaactttatccgcctccatccagtctattaattgttgccgggaagctagagtaagtagttcgccagttaatagtttgcgcaacgttgttgccattgctacaggcatcgtggtgtcacgctcgtcgtttggtatggcttcattcagctccggttcccaacgatcaaggcgagttacatgatcccccatgttgtgcaaaaaagcggttagctccttcggtcctccgatcgttgtcagaagtaagttggccgcagtgttatcactcatggttatggcagcactgcataattctcttactgtcatgccatccgtaagatgcttttctgtgactggtgagtactcaaccaagtcattctgagaatagtgtatgcggcgaccgagttgctcttgcccggcgtcaatacgggataataccgcgccacatagcagaactttaaaagtgctcatcattggaaaacgttcttcggggcgaaaactctcaaggatcttaccgctgttgagatccagttcgatgtaacccactcgtgcacccaactgatcttcagcatcttttactttcaccagcgtttctgggtgagcaaaaacaggaaggcaaaatgccgcaaaaaagggaataagggcgacacggaaatgttgaatactcatactcttcctttttcaatattattgaagcatttatcagggttattgtctcatgagcggatacatatttgaatgtatttagaaaaataaacaaataggggttccgcgcacatttccccgaaaagtgccacctgacgtc

SEQ ID NO: 8 - DNA, 5978 bp, Artificial Sequence
  Description of Artificial Sequence: Synthetic polynucleotide
gacggatcgggagatctcccgatcccctatggtgcactctcagtacaatctgctctgatgccgcatagttaagccagtatctgctccctgcttgtgtgttggaggtcgctgagtagtgcgcgagcaaaatttaagctacaacaaggcaaggcttgaccgacaattgcatgaagaatctgcttagggttaggcgttttgcgctgcttcgcgatgtacgggccagatatacgcgttgacattgattattgactagttattaatagtaatcaattacggggtcattagttcatagcccatatatggagttccgcgttacataacttacggtaaatggcccgcctggctgaccgcccaacgacccccgcccattgacgtcaataatgacgtatgttcccatagtaacgccaatagggactttccattgacgtcaatgggtggagtatttacggtaaactgcccacttggcagtacatcaagtgtatcatatgccaagtacgccccctattgacgtcaatgacggtaaatggcccgcctggcattatgcccagtacatgaccttatgggactttcctacttggcagtacatctacgtattagtcatcgctattaccatggtgatgcggttttggcagtacatcaatgggcgtggatagcggtttgactcacggggatttccaagtctccaccccattgacgtcaatgggagtttgttttggcaccaaaatcaacgggactttccaaaatgtcgtaacaactccgccccattgacgcaaatgggcggtaggcgtgtacggtgggaggtctatataagcagagctctctggctaactagagaacccactgcttactggcttatcgaaattaatacgactcactatagggagacccaagctggctagcgtttaaacttaagcttggtaccgagctcggatccgccgccaccatggctttacttactgcggccgcccggctcttgggaaccaagaatgcatcttgtcttgttcttgcagcccggcatgctagtctgcgcaccgacatcgatgcgacctgcacgccccgccgcgcaagttcgaaccaacgtggcctcaaccagatttggaatgtcaaaaagcagagtgtctatttgatgaatttgaggaaatctggaactttgggccacccaggctctctagatgagaccacctatgaaagactagcagaggaaacgctggactctttagcagagttttttgaagaccttgcagacaagccatacacgtttgaggactatgatgtctcctttgggagtggtgtcttaactgtcaaactgggtggagatctaggaacctatgtgatcaacaagcagacgccaaacaagcaaatctggctatcttctccatccagtggacctaagcgttatgactggactgggaaaaactgggtgtactcccacgacggcgtgtccctccatgagctgctggccgcagagctcactaaagccttaaaaaccaaactggacttgtcttccttggcctattccggaaaagatgcttgactcgagtctagagggcccgtttaaacccgctgatcagcctcgactgtgccttctagttgccagccatctgttgtttgcccctcccccgtgccttccttgaccctggaaggtgccactcccactgtcctttcctaataaaatgaggaaattgcatcgcattgtctgagtaggtgtcattctattctggggggtggggtggggcaggacagcaagggggaggattgggaagacaatagcaggcatgctggggatgcggtgggctctatggcttctgaggcggaaagaaccagctggggctctagggggtatccccacgcgccctgtagcggcgcattaagcgcggcgggtgtggtggttacgcgcagcgtgaccgctacacttgccagcgccctagcgcccgctcctttcgctttcttcccttcctttctcgccacgttcgccggctttccccgtcaagctctaaatcgggggctccctttagggttccgatttagtgctttacggcacctcgaccccaaaaaacttgattagggtgatggttcacgtagtgggccatcgccctgatagacggtttttcgccctttgacgttggagtccacgttctttaatagtggactcttgttccaaactggaacaacactcaaccctatctcggtctattcttttgatttataagggattttgccgatttcggcctattggttaaaaaatgagctgatttaacaaaaatttaacgcgaattaattctgtggaatgtgtgtcagttagggtgtggaaagtccccaggctccccagcaggcagaagtatgcaaagcatgcatctcaattagtcagcaaccaggtgtggaaagtccccaggctccccagcaggcagaagtatgcaaagcatgcatctcaattagtcagcaaccatagtcccgcccctaactccgcccatcccgcccctaactccgcccagttccgcccattctccgccccatggctgactaattttttttatttatgcagaggccgaggccgcctctgcctctgagctattccagaagtagtgaggaggcttttttggaggcctaggcttttgcaaaaagctcccgggagcttgtatatccattttcggatctgatcaagagacaggatgaggatcgtttcgcatgattgaacaagatggattgcacgcaggttctccggccgcttgggtggagaggctattcggctatgactgggcacaacagacaatcggctgctctgatgccgccgtgttccggctgtcagcgcaggggcgcccggttctttttgtcaagaccgacctgtccggtgccctgaatgaactgcaggacgaggcagcgcggctatcgtggctggccacgacgggcgttccttgcgcagctgtgctcgacgttgtcactgaagcgggaagggactggctgctattgggcgaagtgccggggcaggatctcctgtcatctcaccttgctcctgccgagaaagtatccatcatggctgatgcaatgcggcggctgcatacgcttgatccggctacctgcccattcgaccaccaagcgaaacatcgcatcgagcgagcacgtactcggatggaagccggtcttgtcgatcaggatgatctggacgaagagcatcaggggctcgcgccagccgaactgttcgccaggctcaaggcgcgcatgcccgacggcgaggatctcgtcgtgacccatggcgatgcctgcttgccgaatatcatggtggaaaatggccgcttttctggattcatcgactgtggccggctgggtgtggcggaccgctatcaggacatagcgttggctacccgtgatattgctgaagagcttggcggcgaatgggctgaccgcttcctcgtgctttacggtatcgccgctcccgattcgcagcgcatcgccttctatcgccttcttgacgagttcttctgagcgggactctggggttcgaaatgaccgaccaagcgacgcccaacctgccatcacgagatttcgattccaccgccgccttctatgaaaggttgggcttcggaatcgttttccgggacgccggctggatgatcctccagcgcggggatctcatgctggagttcttcgcccaccccaacttgtttattgcagcttataatggttacaaataaagcaatagcatcacaaatttcacaaataaagcatttttttcactgcattctagttgtggtttgtccaaactcatcaatgtatcttatcatgtctgtataccgtcgacctctagctagagcttggcgtaatcatggtcatagctgtttcctgtgtgaaattgttatccgctcacaattccacacaacatacgagccggaagcataaagtgtaaagcctggggtgcctaatgagtgagctaactcacattaattgcgttgcgctcactgcccgctttccagtcgggaaacctgtcgtgccagctgcattaatgaatcggccaacgcgcggggagaggcggtttgcgtattgggcgctcttccgcttcctcgctcactgactcgctgcgctcggtcgttcggctgcggcgagcggtatcagctcactcaaaggcggtaatacggttatccacagaatcaggggataacgcaggaaagaacatgtgagcaaaaggccagcaaaaggccaggaaccgtaaaaaggccgcgttgctggcgtttttccataggctccgcccccctgacgagcatcacaaaaatcgacgctcaagtcagaggtggcgaaacccgacaggactataaagataccaggcgtttccccctggaagctccctcgtgcgctctcctgttccgaccctgccgcttaccggatacctgtccgcctttctcccttcgggaagcgtggcgctttctcatagctcacgctgtaggtatctcagttcggtgtaggtcgttcgctccaagctgggctgtgtgcacgaaccccccgttcagcccgaccgctgcgccttatccggtaactatcgtcttgagtccaacccggtaagacacgacttatcgccactggcagcagccactggtaacaggattagcagagcgaggtatgtaggcggtgctacagagttcttgaagtggtggcctaactacggctacactagaagaacagtatttggtatctgcgctctgctgaagccagttaccttcggaaaaagagttggtagctcttgatccggcaaacaaaccaccgctggtagcggtttttttgtttgcaagcagcagattacgcgcagaaaaaaaggatctcaagaagatcctttgatcttttctacggggtctgacgctcagtggaacgaaaactcacgttaagggattttggtcatgagattatcaaaaaggatcttcacctagatccttttaaattaaaaatgaagttttaaatcaatctaaagtatatatgagtaaacttggtctgacagttaccaatgcttaatcagtgaggcacctatctcagcgatctgtctatttcgttcatccatagttgcctgactccccgtcgtgtagataactacgatacgggagggcttaccatctggccccagtgctgcaatgataccgcgagacccacgctcaccggctccagatttatcagcaataaaccagccagccggaagggccgagcgcagaagtggtcctgcaactttatccgcctccatccagtctattaattgttgccgggaagctagagtaagtagttcgccagttaatagtttgcgcaacgttgttgccattgctacaggcatcgtggtgtcacgctcgtcgtttggtatggcttcattcagctccggttcccaacgatcaaggcgagttacatgatcccccatgttgtgcaaaaaagcggttagctccttcggtcctccgatcgttgtcagaagtaagttggccgcagtgttatcactcatggttatggcagcactgcataattctcttactgtcatgccatccgtaagatgcttttctgtgactggtgagtactcaaccaagtcattctgagaatagtgtatgcggcgaccgagttgctcttgcccggcgtcaatacgggataataccgcgccacatagcagaactttaaaagtgctcatcattggaaaacgttcttcggggcgaaaactctcaaggatcttaccgctgttgagatccagttcgatgtaacccactcgtgcacccaactgatcttcagcatcttttactttcaccagcgtttctgggtgagcaaaaacaggaaggcaaaatgccgcaaaaaagggaataagggcgacacggaaatgttgaatactcatactcttcctttttcaatattattgaagcatttatcagggttattgtctcatgagcggatacatatttgaatgtatttagaaaaataaacaaataggggttccgcgcacatttccccgaaaagtgccacctgacgtc

SEQ ID NO: 9 - DNA, 6020 bp, Artificial Sequence
  Description of Artificial Sequence: Synthetic polynucleotide
gacggatcgggagatctcccgatcccctatggtgcactctcagtacaatctgctctgatgccgcatagttaagccagtatctgctccctgcttgtgtgttggaggtcgctgagtagtgcgcgagcaaaatttaagctacaacaaggcaaggcttgaccgacaattgcatgaagaatctgcttagggttaggcgttttgcgctgcttcgcgatgtacgggccagatatacgcgttgacattgattattgactagttattaatagtaatcaattacggggtcattagttcatagcccatatatggagttccgcgttacataacttacggtaaatggcccgcctggctgaccgcccaacgacccccgcccattgacgtcaataatgacgtatgttcccatagtaacgccaatagggactttccattgacgtcaatgggtggagtatttacggtaaactgcccacttggcagtacatcaagtgtatcatatgccaagtacgccccctattgacgtcaatgacggtaaatggcccgcctggcattatgcccagtacatgaccttatgggactttcctacttggcagtacatctacgtattagtcatcgctattaccatggtgatgcggttttggcagtacatcaatgggcgtggatagcggtttgactcacggggatttccaagtctccaccccattgacgtcaatgggagtttgttttggcaccaaaatcaacgggactttccaaaatgtcgtaacaactccgccccattgacgcaaatgggcggtaggcgtgtacggtgggaggtctatataagcagagctctctggctaactagagaacccactgcttactggcttatcgaaattaatacgactcactatagggagacccaagctggctagcgtttaaacttaagcttggtaccgagctcggatcctccaccggtatgtggactctcgggcgccgcgcagtagccggcctcctggcgtcacccagcccagcccaggcccagaccctcacccgggtcccgcggccggcagagttggccccactctgcggccgccgtggcctgcgcaccgacatcgatgcgacctgcacgccccgccgcgcaagttcgaaccaacgtggcctcaaccagatttggaatgtcaaaaagcagagtgtctatttgatgaatttgaggaaatctggaactttgggccacccaggctctctagatgagaccacctatgaaagactagcagaggaaacgctggactctttagcagagttttttgaagaccttgcagacaagccatacacgtttgaggactatgatgtctcctttgggagtggtgtcttaactgtcaaactgggtggagatctaggaacctatgtgatcaacaagcagacgccaaacaagcaaatctggctatcttctccatccagtggacctaagcgttatgactggactgggaaaaactgggtgtactcccacgacggcgtgtccctccatgagctgctggccgcagagctcactaaagccttaaaaaccaaactggacttgtcttccttggcctattccggaaaagatgcttgactcgagtctagagggcccgtttaaacccgctgatcagcctcgactgtgccttctagttgccagccatctgttgtttgcccctcccccgtgccttccttgaccctggaaggtgccactcccactgtcctttcctaataaaatgaggaaattgcatcgcattgtctgagtaggtgtcattctattctggggggtggggtggggcaggacagcaagggggaggattgggaagacaatagcaggcatgctggggatgcggtgggctctatggcttctgaggcggaaagaaccagctggggctctagggggtatccccacgcgccctgtagcggcgcattaagcgcggcgggtgtggtggttacgcgcagcgtgaccgctacacttgccagcgccctagcgcccgctcctttcgctttcttcccttcctttctcgccacgttcgccggctttccccgtcaagctctaaatcgggggctccctttagggttccgatttagtgctttacggcacctcgaccccaaaaaacttgattagggtgatggttcacgtagtgggccatcgccctgatagacggtttttcgccctttgacgttggagtccacgttctttaatagtggactcttgttccaaactggaacaacactcaaccctatctcggtctattcttttgatttataagggattttgccgatttcggcctattggttaaaaaatgagctgatttaacaaaaatttaacgcgaattaattctgtggaatgtgtgtcagttagggtgtggaaagtccccaggctccccagcaggcagaagtatgcaaagcatgcatctcaattagtcagcaaccaggtgtggaaagtccccaggctccccagcaggcagaagtatgcaaagcatgcatctcaattagtcagcaaccatagtcccgcccctaactccgcccatcccgcccctaactccgcccagttccgcccattctccgccccatggctgactaattttttttatttatgcagaggccgaggccgcctctgcctctgagctattccagaagtagtgaggaggcttttttggaggcctaggcttttgcaaaaagctcccgggagcttgtatatccattttcggatctgatcaagagacaggatgaggatcgtttcgcatgattgaacaagatggattgcacgcaggttctccggccgcttgggtggagaggctattcggctatgactgggcacaacagacaatcggctgctctgatgccgccgtgttccggctgtcagcgcaggggcgcccggttctttttgtcaagaccgacctgtccggtgccctgaatgaactgcaggacgaggcagcgcggctatcgtggctggccacgacgggcgttccttgcgcagctgtgctcgacgttgtcactgaagcgggaagggactggctgctattgggcgaagtgccggggcaggatctcctgtcatctcaccttgctcctgccgagaaagtatccatcatggctgatgcaatgcggcggctgcatacgcttgatccggctacctgcccattcgaccaccaagcgaaacatcgcatcgagcgagcacgtactcggatggaagccggtcttgtcgatcaggatgatctggacgaagagcatcaggggctcgcgccagccgaactgttcgccaggctcaaggcgcgcatgcccgacggcgaggatctcgtcgtgacccatggcgatgcctgcttgccgaatatcatggtggaaaatggccgcttttctggattcatcgactgtggccggctgggtgtggcggaccgctatcaggacatagcgttggctacccgtgatattgctgaagagcttggcggcgaatgggctgaccgcttcctcgtgctttacggtatcgccgctcccgattcgcagcgcatcgccttctatcgccttcttgacgagttcttctgagcgggactctggggttcgaaatgaccgaccaagcgacgcccaacctgccatcacgagatttcgattccaccgccgccttctatgaaaggttgggcttcggaatcgttttccgggacgccggctggatgatcctccagcgcggggatctcatgctggagttcttcgcccaccccaacttgtttattgcagcttataatggttacaaataaagcaatagcatcacaaatttcacaaataaagcatttttttcactgcattctagttgtggtttgtccaaactcatcaatgtatcttatcatgtctgtataccgtcgacctctagctagagcttggcgtaatcatggtcatagctgtttcctgtgtgaaattgttatccgctcacaattccacacaacatacgagccggaagcataaagtgtaaagcctggggtgcctaatgagtgagctaactcacattaattgcgttgcgctcactgcccgctttccagtcgggaaacctgtcgtgccagctgcattaatgaatcggccaacgcgcggggagaggcggtttgcgtattgggcgctcttccgcttcctcgctcactgactcgctgcgctcggtcgttcggctgcggcgagcggtatcagctcactcaaaggcggtaatacggttatccacagaatcaggggataacgcaggaaagaacatgtgagcaaaaggccagcaaaaggccaggaaccgtaaaaaggccgcgttgctggcgtttttccataggctccgcccccctgacgagcatcacaaaaatcgacgctcaagtcagaggtggcgaaacccgacaggactataaagataccaggcgtttccccctggaagctccctcgtgcgctctcctgttccgaccctgccgcttaccggatacctgtccgcctttctcccttcgggaagcgtggcgctttctcatagctcacgctgtaggtatctcagttcggtgtaggtcgttcgctccaagctgggctgtgtgcacgaaccccccgttcagcccgaccgctgcgccttatccggtaactatcgtcttgagtccaacccggtaagacacgacttatcgccactggcagcagccactggtaacaggattagcagagcgaggtatgtaggcggtgctacagagttcttgaagtggtggcctaactacggctacactagaagaacagtatttggtatctgcgctctgctgaagccagttaccttcggaaaaagagttggtagctcttgatccggcaaacaaaccaccgctggtagcggtttttttgtttgcaagcagcagattacgcgcagaaaaaaaggatctcaagaagatcctttgatcttttctacggggtctgacgctcagtggaacgaaaactcacgttaagggattttggtcatgagattatcaaaaaggatcttcacctagatccttttaaattaaaaatgaagttttaaatcaatctaaagtatatatgagtaaacttggtctgacagttaccaatgcttaatcagtgaggcacctatctcagcgatctgtctatttcgttcatccatagttgcctgactccccgtcgtgtagataactacgatacgggagggcttaccatctggccccagtgctgcaatgataccgcgagacccacgctcaccggctccagatttatcagcaataaaccagccagccggaagggccgagcgcagaagtggtcctgcaactttatccgcctccatccagtctattaattgttgccgggaagctagagtaagtagttcgccagttaatagtttgcgcaacgttgttgccattgctacaggcatcgtggtgtcacgctcgtcgtttggtatggcttcattcagctccggttcccaacgatcaaggcgagttacatgatcccccatgttgtgcaaaaaagcggttagctccttcggtcctccgatcgttgtcagaagtaagttggccgcagtgttatcactcatggttatggcagcactgcataattctcttactgtcatgccatccgtaagatgcttttctgtgactggtgagtactcaaccaagtcattctgagaatagtgtatgcggcgaccgagttgctcttgcccggcgtcaatacgggataataccgcgccacatagcagaactttaaaagtgctcatcattggaaaacgttcttcggggcgaaaactctcaaggatcttaccgctgttgagatccagttcgatgtaacccactcgtgcacccaactgatcttcagcatcttttactttcaccagcgtttctgggtgagcaaaaacaggaaggcaaaatgccgcaaaaaagggaataagggcgacacggaaatgttgaatactcatactcttcctttttcaatattattgaagcatttatcagggttattgtctcatgagcggatacatatttgaatgtatttagaaaaataaacaaataggggttccgcgcacatttccccgaaaagtgccacctgacgtc

SEQ ID NO: 10 - DNA, 4703 bp, Artificial Sequence
  Description of Artificial Sequence: Synthetic polynucleotide
gccttaattaggctgcgcgctcgctcgctcactgaggccgcccgggcaaagcccgggcgtcgggcgacctttggtcgcccggcctcagtgagcgagcgagcgcgcagagagggagtggccaactccatcactaggggttccttgtagttaatgattaacccgccatgctacttatctaccagggtaatggggatcctctagaactatagctagtcgacattgattattgactagttattaatagtaatcaattacggggtcattagttcatagcccatatatggagttccgcgttacataacttacggtaaatggcccgcctggctgaccgcccaacgacccccgcccattgacgtcaataatgacgtatgttcccatagtaacgccaatagggactttccattgacgtcaatgggtggagtatttacggtaaactgcccacttggcagtacatcaagtgtatcatatgccaagtacgccccctattgacgtcaatgacggtaaatggcccgcctggcattatgcccagtacatgaccttatgggactttcctacttggcagtacatctacgtattagtcatcgctattaccatgtcgaggccacgttctgcttcactctccccatctcccccccctccccacccccaattttgtatttatttattttttaattattttgtgcagcgatgggggcggggggggggggcgcgcgccaggcggggcggggcggggcgaggggcggggcggggcgaggcggagaggtgcggcggcagccaatcagagcggcgcgctccgaaagtttccttttatggcgaggcggcggcggcggcggccctataaaaagcgaagcgcgcggcgggcgggagcaagcttgccgccaccatgtggactctcgggcgccgcgcagtagccggcctcctggcgtcacccagcccggcccaggcccagaccctcacccgggtcccgcggccggcagagttggccccactctgcggccgccgtggcctgcgcaccgacatcgatgcgacctgcacgccccgccgcgcaagttcgaaccaacgtggcctcaaccagatttggaatgtcaaaaagcagagtgtctatttgatgaatttgaggaaatctggaactttgggccacccaggctctctagatgagaccacctatgaaagactagcagaggaaacgctggactctttagcagagttttttgaagaccttgcagacaagccatacacgtttgaggactatgatgtctcctttgggagtggtgtcttaactgtcaaactgggtggagatctaggaacctatgtgatcaacaagcagacgccaaacaagcaaatctggctatcttctccatccagtggacctaagcgttatgactggactgggaaaaactgggtgttctcccacgacggcgtgtccctccatgagctgctggccgcagagctcactaaagccttaaaaaccaaactggacttgtcttggttggcctattccggaaaagatgcttgactcgaggacggggtgaactacgcctgaggatccgatctttttccctctgccaaaaattatggggacatcatgaagccccttgagcatctgacttctggctaataaaggaaatttattttcattgcaatagtgtgttggaattttttgtgtctctcactcggaagcaattcgttgatctgaatttcgaccacccataatacccattaccctggtagataagtagcatggcgggttaatcattaactacaaggaacccctagtgatggagttggccactccctctctgcgcgctcgctcgctcactgaggccgggcgaccaaaggtcgcccgacgcccgggctttgcccgggcggcctcagtgagcgagcgagcgcgcagccttaattaacctaattcactggccgtcgttttacaacgtcgtgactgggaaaaccctggcgttacccaacttaatcgccttgcagcacatccccctttcgccagctggcgtaatagcgaagaggcccgcaccgatcgcccttcccaacagttgcgcagcctgaatggcgaatgggacgcgccctgtagcggcgcattaagcgcggcgggtgtggtggttacgcgcagcgtgaccgctacacttgccagcgccctagcgcccgctcctttcgctttcttcccttcctttctcgccacgttcgccggctttccccgtcaagctctaaatcgggggctccctttagggttccgatttagtgctttacggcacctcgaccccaaaaaacttgattagggtgatggttcacgtagtgggccatcgccctgatagacggtttttcgccctttgacgttggagtccacgttctttaatagtggactcttgttccaaactggaacaacactcaaccctatctcggtctattcttttgatttataagggattttgccgatttcggcctattggttaaaaaatgagctgatttaacaaaaatttaacgcgaattttaacaaaatattaacgcttacaatttaggtggcacttttcggggaaatgtgcgcggaacccctatttgtttatttttctaaatacattcaaatatgtatccgctcatgagacaataaccctgataaatgcttcaataatattgaaaaaggaagagtatgagtattcaacatttccgtgtcgcccttattcccttttttgcggcattttgccttcctgtttttgctcacccagaaacgctggtgaaagtaaaagatgctgaagatcagttgggtgcacgagtgggttacatcgaactggatctcaacagcggtaagatccttgagagttttcgccccgaagaacgttttccaatgatgagcacttttaaagttctgctatgtggcgcggtattatcccgtattgacgccgggcaagagcaactcggtcgccgcatacactattctcagaatgacttggttgagtactcaccagtcacagaaaagcatcttacggatggcatgacagtaagagaattatgcagtgctgccataaccatgagtgataacactgcggccaacttacttctgacaacgatcggaggaccgaaggagctaaccgcttttttgcacaacatgggggatcatgtaactcgccttgatcgttgggaaccggagctgaatgaagccataccaaacgacgagcgtgacaccacgatgcctgtagcaatggcaacaacgttgcgcaaactattaactggcgaactacttactctagcttcccggcaacaattaatagactggatggaggcggataaagttgcaggaccacttctgcgctcggcccttccggctggctggtttattgctgataaatctggagccggtgagcgtgggtctcgcggtatcattgcagcactggggccagatggtaagccctcccgtatcgtagttatctacacgacggggagtcaggcaactatggatgaacgaaatagacagatcgctgagataggtgcctcactgattaagcattggtaactgtcagaccaagtttactcatatatactttagattgatttaaaacttcatttttaatttaaaaggatctaggtgaagatcctttttgataatctcatgaccaaaatcccttaacgtgagttttcgttccactgagcgtcagaccccgtagaaaagatcaaaggatcttcttgagatcctttttttctgcgcgtaatctgctgcttgcaaacaaaaaaaccaccgctaccagcggtggtttgtttgccggatcaagagctaccaactctttttccgaaggtaactggcttcagcagagcgcagataccaaatactgttcttctagtgtagccgtagttaggccaccacttcaagaactctgtagcaccgcctacatacctcgctctgctaatcctgttaccagtggctgctgccagtggcgataagtcgtgtcttaccgggttggactcaagacgatagttaccggataaggcgcagcggtcgggctgaacggggggttcgtgcacacagcccagcttggagcgaacgacctacaccgaactgagatacctacagcgtgagctatgagaaagcgccacgcttcccgaagggagaaaggcggacaggtatccggtaagcggcagggtcggaacaggagagcgcacgagggagcttccagggggaaacgcctggtatctttatagtcctgtcgggtttcgccacctctgacttgagcgtcgatttttgtgatgctcgtcaggggggcggagcctatggaaaaacgccagcaacgcggcctttttacggttcctggccttttgctggccttttgctcacatgttctttcctgcgttatcccctgattctgtggataaccgtattaccgcctttgagtgagctgataccgctcgccgcagccgaacgaccgagcgcagcgagtcagtgagcgaggaagcggaagagcgcccaatacgcaaaccgcctctccccgcgcgttggccgattcattaatgcagctggcacgacaggtttcccgactggaaagcgggcagtgagcgcaacgcaattaatgtgagttagctcactcattaggcaccccaggctttacactttatgcttccggctcgtatgttgtgtggaattgtgagcggataacaatttcacacaggaaacagctatgaccatgattacgccagatttaattaag

SEQ ID NO: 11 - DNA, 4945 bp, Artificial Sequence
  Description of Artificial Sequence: Synthetic polynucleotide
gccttaattaggctgcgcgctcgctcgctcactgaggccgcccgggcaaagcccgggcgtcgggcgacctttggtcgcccggcctcagtgagcgagcgagcgcgcagagagggagtggccaactccatcactaggggttccttgtagttaatgattaacccgccatgctacttatctaccagggtaatggggatcctctagaactatagctagtcgacattgattattgactagttattaatagtaatcaattacggggtcattagttcatagcccatatatggagttccgcgttacataacttacggtaaatggcccgcctggctgaccgcccaacgacccccgcccattgacgtcaataatgacgtatgttcccatagtaacgccaatagggactttccattgacgtcaatgggtggagtatttacggtaaactgcccacttggcagtacatcaagtgtatcatatgccaagtacgccccctattgacgtcaatgacggtaaatggcccgcctggcattatgcccagtacatgaccttatgggactttcctacttggcagtacatctacgtattagtcatcgctattaccatgtcgaggccacgttctgcttcactctccccatctcccccccctccccacccccaattttgtatttatttattttttaattattttgtgcagcgatgggggcggggggggggggcgcgcgccaggcggggcggggcggggcgaggggcggggcggggcgaggcggagaggtgcggcggcagccaatcagagcggcgcgctccgaaagtttccttttatggcgaggcggcggcggcggcggccctataaaaagcgaagcgcgcggcgggcgggagcaagcttggagtcgctgcgttgccttcgccccgtgccccgctccgcgccgcctcgcgccgcccgccccggctctgactgaccgcgttactcccacaggtgagcgggcgggacggcccttctcctccgggctgtaattagcaagaggtaagggtttaagggatggttggttggtggggtattaatgtttaattacctgttttacaggcctgaaatcacttggttttaggttgggcggccgatccaccggtgccgccaccatgtggactctcgggcgccgcgcagtagccggcctcctggcgtcacccagcccggcccaggcccagaccctcacccgggtcccgcggccggcagagttggccccactctgcggccgccgtggcctgcgcaccgacatcgatgcgacctgcacgccccgccgcgcaagttcgaaccaacgtggcctcaaccagatttggaatgtcaaaaagcagagtgtctatttgatgaatttgaggaaatctggaactttgggccacccaggctctctagatgagaccacctatgaaagactagcagaggaaacgctggactctttagcagagttttttgaagaccttgcagacaagccatacacgtttgaggactatgatgtctcctttgggagtggtgtcttaactgtcaaactgggtggagatctaggaacctatgtgatcaacaagcagacgccaaacaagcaaatctggctatcttctccatccagtggacctaagcgttatgactggactgggaaaaactgggtgttctcccacgacggcgtgtccctccatgagctgctggccgcagagctcactaaagccttaaaaaccaaactggacttgtcttggttggcctattccggaaaagatgcttgactcgaggacggggtgaactacgcctgaggatccgatctttttccctctgccaaaaattatggggacatcatgaagccccttgagcatctgacttctggctaataaaggaaatttattttcattgcaatagtgtgttggaattttttgtgtctctcactcggaagcaattcgttgatctgaatttcgaccacccataatacccattaccctggtagataagtagcatggcgggttaatcattaactacaaggaacccctagtgatggagttggccactccctctctgcgcgctcgctcgctcactgaggccgggcgaccaaaggtcgcccgacgcccgggctttgcccgggcggcctcagtgagcgagcgagcgcgcagccttaattaacctaattcactggccgtcgttttacaacgtcgtgactgggaaaaccctggcgttacccaacttaatcgccttgcagcacatccccctttcgccagctggcgtaatagcgaagaggcccgcaccgatcgcccttcccaacagttgcgcagcctgaatggcgaatgggacgcgccctgtagcggcgcattaagcgcggcgggtgtggtggttacgcgcagcgtgaccgctacacttgccagcgccctagcgcccgctcctttcgctttcttcccttcctttctcgccacgttcgccggctttccccgtcaagctctaaatcgggggctccctttagggttccgatttagtgctttacggcacctcgaccccaaaaaacttgattagggtgatggttcacgtagtgggccatcgccctgatagacggtttttcgccctttgacgttggagtccacgttctttaatagtggactcttgttccaaactggaacaacactcaaccctatctcggtctattcttttgatttataagggattttgccgatttcggcctattggttaaaaaatgagctgatttaacaaaaatttaacgcgaattttaacaaaatattaacgcttacaatttaggtggcacttttcggggaaatgtgcgcggaacccctatttgtttatttttctaaatacattcaaatatgtatccgctcatgagacaataaccctgataaatgcttcaataatattgaaaaaggaagagtatgagtattcaacatttccgtgtcgcccttattcccttttttgcggcattttgccttcctgtttttgctcacccagaaacgctggtgaaagtaaaagatgctgaagatcagttgggtgcacgagtgggttacatcgaactggatctcaacagcggtaagatccttgagagttttcgccccgaagaacgttttccaatgatgagcacttttaaagttctgctatgtggcgcggtattatcccgtattgacgccgggcaagagcaactcggtcgccgcatacactattctcagaatgacttggttgagtactcaccagtcacagaaaagcatcttacggatggcatgacagtaagagaattatgcagtgctgccataaccatgagtgataacactgcggccaacttacttctgacaacgatcggaggaccgaaggagctaaccgcttttttgcacaacatgggggatcatgtaactcgccttgatcgttgggaaccggagctgaatgaagccataccaaacgacgagcgtgacaccacgatgcctgtagcaatggcaacaacgttgcgcaaactattaactggcgaactacttactctagcttcccggcaacaattaatagactggatggaggcggataaagttgcaggaccacttctgcgctcggcccttccggctggctggtttattgctgataaatctggagccggtgagcgtgggtctcgcggtatcattgcagcactggggccagatggtaagccctcccgtatcgtagttatctacacgacggggagtcaggcaactatggatgaacgaaatagacagatcgctgagataggtgcctcactgattaagcattggtaactgtcagaccaagtttactcatatatactttagattgatttaaaacttcatttttaatttaaaaggatctaggtgaagatcctttttgataatctcatgaccaaaatcccttaacgtgagttttcgttccactgagcgtcagaccccgtagaaaagatcaaaggatcttcttgagatcctttttttctgcgcgtaatctgctgcttgcaaacaaaaaaaccaccgctaccagcggtggtttgtttgccggatcaagagctaccaactctttttccgaaggtaactggcttcagcagagcgcagataccaaatactgttcttctagtgtagccgtagttaggccaccacttcaagaactctgtagcaccgcctacatacctcgctctgctaatcctgttaccagtggctgctgccagtggcgataagtcgtgtcttaccgggttggactcaagacgatagttaccggataaggcgcagcggtcgggctgaacggggggttcgtgcacacagcccagcttggagcgaacgacctacaccgaactgagatacctacagcgtgagctatgagaaagcgccacgcttcccgaagggagaaaggcggacaggtatccggtaagcggcagggtcggaacaggagagcgcacgagggagcttccagggggaaacgcctggtatctttatagtcctgtcgggtttcgccacctctgacttgagcgtcgatttttgtgatgctcgtcaggggggcggagcctatggaaaaacgccagcaacgcggcctttttacggttcctggccttttgctggccttttgctcacatgttctttcctgcgttatcccctgattctgtggataaccgtattaccgcctttgagtgagctgataccgctcgccgcagccgaacgaccgagcgcagcgagtcagtgagcgaggaagcggaagagcgcccaatacgcaaaccgcctctccccgcgcgttggccgattcattaatgcagctggcacgacaggtttcccgactggaaagcgggcagtgagcgcaacgcaattaatgtgagttagctcactcattaggcaccccaggctttacactttatgcttccggctcgtatgttgtgtggaattgtgagcggataacaatttcacacaggaaacagctatgaccatgattacgccagatttaattaag

SEQ ID NO: 12 - DNA, 4883 bp, Artificial Sequence
  Description of Artificial Sequence: Synthetic polynucleotide
gccttaattaggctgcgcgctcgctcgctcactgaggccgcccgggcaaagcccgggcgtcgggcgacctttggtcgcccggcctcagtgagcgagcgagcgcgcagagagggagtggccaactccatcactaggggttccttgtagttaatgattaacccgccatgctacttatctaccagggtaatggggatcctctagaactatagctagtcgacattgattattgactagttattaatagtaatcaattacggggtcattagttcatagcccatatatggagttccgcgttacataacttacggtaaatggcccgcctggctgaccgcccaacgacccccgcccattgacgtcaataatgacgtatgttcccatagtaacgccaatagggactttccattgacgtcaatgggtggagtatttacggtaaactgcccacttggcagtacatcaagtgtatcatatgccaagtacgccccctattgacgtcaatgacggtaaatggcccgcctggcattatgcccagtacatgaccttatgggactttcctacttggcagtacatctacgtattagtcatcgctattaccatgtcgaggccacgttctgcttcactctccccatctcccccccctccccacccccaattttgtatttatttattttttaattattttgtgcagcgatgggggcggggggggggggcgcgcgccaggcggggcggggcggggcgaggggcggggcggggcgaggcggagaggtgcggcggcagccaatcagagcggcgcgctccgaaagtttccttttatggcgaggcggcggcggcggcggccctataaaaagcgaagcgcgcggcgggcgggagcaagcttgaactgaaaaaccagaaagttaactggtaagtttagtctttttgtcttttatttcaggtcccggatccggtggtggtgcaaatcaaagaactgctcctcagtggatgttgcctttacttctaggcctgtacggaagtgttacttctgctctaaaagctgcggaattgtacccgcggccgatccaccggtatgtggactctcgggcgccgcgcagtagccggcctcctggcgtcacccagcccggcccaggcccagaccctcacccgggtcccgcggccggcagagttggccccactctgcggccgccgtggcctgcgcaccgacatcgatgcgacctgcacgccccgccgcgcaagttcgaaccaacgtggcctcaaccagatttggaatgtcaaaaagcagagtgtctatttgatgaatttgaggaaatctggaactttgggccacccaggctctctagatgagaccacctatgaaagactagcagaggaaacgctggactctttagcagagttttttgaagaccttgcagacaagccatacacgtttgaggactatgatgtctcctttgggagtggtgtcttaactgtcaaactgggtggagatctaggaacctatgtgatcaacaagcagacgccaaacaagcaaatctggctatcttctccatccagtggacctaagcgttatgactggactgggaaaaactgggtgttctcccacgacggcgtgtccctccatgagctgctggccgcagagctcactaaagccttaaaaaccaaactggacttgtcttggttggcctattccggaaaagatgcttgactcgaggacggggtgaactacgcctgaggatccgatctttttccctctgccaaaaattatggggacatcatgaagccccttgagcatctgacttctggctaataaaggaaatttattttcattgcaatagtgtgttggaattttttgtgtctctcactcggaagcaattcgttgatctgaatttcgaccacccataatacccattaccctggtagataagtagcatggcgggttaatcattaactacaaggaacccctagtgatggagttggccactccctctctgcgcgctcgctcgctcactgaggccgggcgaccaaaggtcgcccgacgcccgggctttgcccgggcggcctcagtgagcgagcgagcgcgcagccttaattaacctaattcactggccgtcgttttacaacgtcgtgactgggaaaaccctggcgttacccaacttaatcgccttgcagcacatccccctttcgccagctggcgtaatagcgaagaggcccgcaccgatcgcccttcccaacagttgcgcagcctgaatggcgaatgggacgcgccctgtagcggcgcattaagcgcggcgggtgtggtggttacgcgcagcgtgaccgctacacttgccagcgccctagcgcccgctcctttcgctttcttcccttcctttctcgccacgttcgccggctttccccgtcaagctctaaatcgggggctccctttagggttccgatttagtgctttacggcacctcgaccccaaaaaacttgattagggtgatggttcacgtagtgggccatcgccctgatagacggtttttcgccctttgacgttggagtccacgttctttaatagtggactcttgttccaaactggaacaacactcaaccctatctcggtctattcttttgatttataagggattttgccgatttcggcctattggttaaaaaatgagctgatttaacaaaaatttaacgcgaattttaacaaaatattaacgcttacaatttaggtggcacttttcggggaaatgtgcgcggaacccctatttgtttatttttctaaatacattcaaatatgtatccgctcatgagacaataaccctgataaatgcttcaataatattgaaaaaggaagagtatgagtattcaacatttccgtgtcgcccttattcccttttttgcggcattttgccttcctgtttttgctcacccagaaacgctggtgaaagtaaaagatgctgaagatcagttgggtgcacgagtgggttacatcgaactggatctcaacagcggtaagatccttgagagttttcgccccgaagaacgttttccaatgatgagcacttttaaagttctgctatgtggcgcggtattatcccgtattgacgccgggcaagagcaactcggtcgccgcatacactattctcagaatgacttggttgagtactcaccagtcacagaaaagcatcttacggatggcatgacagtaagagaattatgcagtgctgccataaccatgagtgataacactgcggccaacttacttctgacaacgatcggaggaccgaaggagctaaccgcttttttgcacaacatgggggatcatgtaactcgccttgatcgttgggaaccggagctgaatgaagccataccaaacgacgagcgtgacaccacgatgcctgtagcaatggcaacaacgttgcgcaaactattaactggcgaactacttactctagcttcccggcaacaattaatagactggatggaggcggataaagttgcaggaccacttctgcgctcggcccttccggctggctggtttattgctgataaatctggagccggtgagcgtgggtctcgcggtatcattgcagcactggggccagatggtaagccctcccgtatcgtagttatctacacgacggggagtcaggcaactatggatgaacgaaatagacagatcgctgagataggtgcctcactgattaagcattggtaactgtcagaccaagtttactcatatatactttagattgatttaaaacttcatttttaatttaaaaggatctaggtgaagatcctttttgataatctcatgaccaaaatcccttaacgtgagttttcgttccactgagcgtcagaccccgtagaaaagatcaaaggatcttcttgagatcctttttttctgcgcgtaatctgctgcttgcaaacaaaaaaaccaccgctaccagcggtggtttgtttgccggatcaagagctaccaactctttttccgaaggtaactggcttcagcagagcgcagataccaaatactgttcttctagtgtagccgtagttaggccaccacttcaagaactctgtagcaccgcctacatacctcgctctgctaatcctgttaccagtggctgctgccagtggcgataagtcgtgtcttaccgggttggactcaagacgatagttaccggataaggcgcagcggtcgggctgaacggggggttcgtgcacacagcccagcttggagcgaacgacctacaccgaactgagatacctacagcgtgagctatgagaaagcgccacgcttcccgaagggagaaaggcggacaggtatccggtaagcggcagggtcggaacaggagagcgcacgagggagcttccagggggaaacgcctggtatctttatagtcctgtcgggtttcgccacctctgacttgagcgtcgatttttgtgatgctcgtcaggggggcggagcctatggaaaaacgccagcaacgcggcctttttacggttcctggccttttgctggccttttgctcacatgttctttcctgcgttatcccctgattctgtggataaccgtattaccgcctttgagtgagctgataccgctcgccgcagccgaacgaccgagcgcagcgagtcagtgagcgaggaagcggaagagcgcccaatacgcaaaccgcctctccccgcgcgttggccgattcattaatgcagctggcacgacaggtttcccgactggaaagcgggcagtgagcgcaacgcaattaatgtgagttagctcactcattaggcaccccaggctttacactttatgcttccggctcgtatgttgtgtggaattgtgagcggataacaatttcacacaggaaacagctatgaccatgattacgccagatttaattaag

SEQ ID NO: 13 - DNA, 4883 bp, Artificial Sequence
  Description of Artificial Sequence: Synthetic polynucleotide
gccttaattaggctgcgcgctcgctcgctcactgaggccgcccgggcaaagcccgggcgtcgggcgacctttggtcgcccggcctcagtgagcgagcgagcgcgcagagagggagtggccaactccatcactaggggttccttgtagttaatgattaacccgccatgctacttatctaccagggtaatggggatcctctagaactatagctagtcgacattgattattgactagttattaatagtaatcaattacggggtcattagttcatagcccatatatggagttccgcgttacataacttacggtaaatggcccgcctggctgaccgcccaacgacccccgcccattgacgtcaataatgacgtatgttcccatagtaacgccaatagggactttccattgacgtcaatgggtggagtatttacggtaaactgcccacttggcagtacatcaagtgtatcatatgccaagtacgccccctattgacgtcaatgacggtaaatggcccgcctggcattatgcccagtacatgaccttatgggactttcctacttggcagtacatctacgtattagtcatcgctattaccatgtcgaggccacgttctgcttcactctccccatctcccccccctccccacccccaattttgtatttatttattttttaattattttgtgcagcgatgggggcggggggggggggcgcgcgccaggcggggcggggcggggcgaggggcggggcggggcgaggcggagaggtgcggcggcagccaatcagagcggcgcgctccgaaagtttccttttatggcgaggcggcggcggcggcggccctataaaaagcgaagcgcgcggcgggcgggagcaagcttgaactgaaaaaccagaaagttaactggtaagtttagtctttttgtcttttatttcaggtcccggatccggtggtggtgcaaatcaaagaactgctcctcagtggatgttgcctttacttctaggcctgtacggaagtgttacttctgctctaaaagctgcggaattgtacccgcggccgatccaccggtatgtggaccctgggccggcgggctgtggccggcctgttggcctctcccagccctgctcaagcccagacactgacccgggtcccccgacccgcagagctcgctcctctgtgcggacggcgggggctgagaacagacattgacgcaacctgcaccccacggagagcttcatcaaaccaacgcggactcaatcagatctggaatgtcaagaagcagtctgtatatttgatgaatctgcgcaaatccggaaccttgggacatcctggaagccttgatgagaccacatacgaacggctcgctgaagagacattggacagtctggctgagttctttgaggacctcgcggataagccatatacatttgaagactatgatgtttcttttggctcaggggtactgacagtgaaactgggaggggatctggggacctatgtcatcaataagcaaacacccaacaaacagatctggctgtcatccccaagcagcgggcccaagcgctatgattggacagggaaaaactgggtctattcccatgacggggtatccctgcacgaactgcttgcggcggaacttactaaggccctgaagacaaagctggacctgtcttcacttgcctacagtggtaaagatgcgtaactcgaggacggggtgaactacgcctgaggatccgatctttttccctctgccaaaaattatggggacatcatgaagccccttgagcatctgacttctggctaataaaggaaatttattttcattgcaatagtgtgttggaattttttgtgtctctcactcggaagcaattcgttgatctgaatttcgaccacccataatacccattaccctggtagataagtagcatggcgggttaatcattaactacaaggaacccctagtgatggagttggccactccctctctgcgcgctcgctcgctcactgaggccgggcgaccaaaggtcgcccgacgcccgggctttgcccgggcggcctcagtgagcgagcgagcgcgcagccttaattaacctaattcactggccgtcgttttacaacgtcgtgactgggaaaaccctggcgttacccaacttaatcgccttgcagcacatccccctttcgccagctggcgtaatagcgaagaggcccgcaccgatcgcccttcccaacagttgcgcagcctgaatggcgaatgggacgcgccctgtagcggcgcattaagcgcggcgggtgtggtggttacgcgcagcgtgaccgctacacttgccagcgccctagcgcccgctcctttcgctttcttcccttcctttctcgccacgttcgccggctttccccgtcaagctctaaatcgggggctccctttagggttccgatttagtgctttacggcacctcgaccccaaaaaacttgattagggtgatggttcacgtagtgggccatcgccctgatagacggtttttcgccctttgacgttggagtccacgttctttaatagtggactcttgttccaaactggaacaacactcaaccctatctcggtctattcttttgatttataagggattttgccgatttcggcctattggttaaaaaatgagctgatttaacaaaaatttaacgcgaattttaacaaaatattaacgcttacaatttaggtggcacttttcggggaaatgtgcgcggaacccctatttgtttatttttctaaatacattcaaatatgtatccgctcatgagacaataaccctgataaatgcttcaataatattgaaaaaggaagagtatgagtattcaacatttccgtgtcgcccttattcccttttttgcggcattttgccttcctgtttttgctcacccagaaacgctggtgaaagtaaaagatgctgaagatcagttgggtgcacgagtgggttacatcgaactggatctcaacagcggtaagatccttgagagttttcgccccgaagaacgttttccaatgatgagcacttttaaagttctgctatgtggcgcggtattatcccgtattgacgccgggcaagagcaactcggtcgccgcatacactattctcagaatgacttggttgagtactcaccagtcacagaaaagcatcttacggatggcatgacagtaagagaattatgcagtgctgccataaccatgagtgataacactgcggccaacttacttctgacaacgatcggaggaccgaaggagctaaccgcttttttgcacaacatgggggatcatgtaactcgccttgatcgttgggaaccggagctgaatgaagccataccaaacgacgagcgtgacaccacgatgcctgtagcaatggcaacaacgttgcgcaaactattaactggcgaactacttactctagcttcccggcaacaattaatagactggatggaggcggataaagttgcaggaccacttctgcgctcggcccttccggctggctggtttattgctgataaatctggagccggtgagcgtgggtctcgcggtatcattgcagcactggggccagatggtaagccctcccgtatcgtagttatctacacgacggggagtcaggcaactatggatgaacgaaatagacagatcgctgagataggtgcctcactgattaagcattggtaactgtcagaccaagtttactcatatatactttagattgatttaaaacttcatttttaatttaaaaggatctaggtgaagatcctttttgataatctcatgaccaaaatcccttaacgtgagttttcgttccactgagcgtcagaccccgtagaaaagatcaaaggatcttcttgagatcctttttttctgcgcgtaatctgctgcttgcaaacaaaaaaaccaccgctaccagcggtggtttgtttgccggatcaagagctaccaactctttttccgaaggtaactggcttcagcagagcgcagataccaaatactgttcttctagtgtagccgtagttaggccaccacttcaagaactctgtagcaccgcctacatacctcgctctgctaatcctgttaccagtggctgctgccagtggcgataagtcgtgtcttaccgggttggactcaagacgatagttaccggataaggcgcagcggtcgggctgaacggggggttcgtgcacacagcccagcttggagcgaacgacctacaccgaactgagatacctacagcgtgagctatgagaaagcgccacgcttcccgaagggagaaaggcggacaggtatccggtaagcggcagggtcggaacaggagagcgcacgagggagcttccagggggaaacgcctggtatctttatagtcctgtcgggtttcgccacctctgacttgagcgtcgatttttgtgatgctcgtcaggggggcggagcctatggaaaaacgccagcaacgcggcctttttacggttcctggccttttgctggccttttgctcacatgttctttcctgcgttatcccctgattctgtggataaccgtattaccgcctttgagtgagctgataccgctcgccgcagccgaacgaccgagcgcagcgagtcagtgagcgaggaagcggaagagcgcccaatacgcaaaccgcctctccccgcgcgttggccgattcattaatgcagctggcacgacaggtttcccgactggaaagcgggcagtgagcgcaacgcaattaatgtgagttagctcactcattaggcaccccaggctttacactttatgcttccggctcgtatgttgtgtggaattgtgagcggataacaatttcacacaggaaacagctatgaccatgattacgccagatttaattaag

SEQ ID NO: 14 - DNA, 4883 bp, Artificial Sequence
  Description of Artificial Sequence: Synthetic polynucleotide
gccttaattaggctgcgcgctcgctcgctcactgaggccgcccgggcaaagcccgggcgtcgggcgacctttggtcgcccggcctcagtgagcgagcgagcgcgcagagagggagtggccaactccatcactaggggttccttgtagttaatgattaacccgccatgctacttatctaccagggtaatggggatcctctagaactatagctagtcgacattgattattgactagttattaatagtaatcaattacggggtcattagttcatagcccatatatggagttccgcgttacataacttacggtaaatggcccgcctggctgaccgcccaacgacccccgcccattgacgtcaataatgacgtatgttcccatagtaacgccaatagggactttccattgacgtcaatgggtggagtatttacggtaaactgcccacttggcagtacatcaagtgtatcatatgccaagtacgccccctattgacgtcaatgacggtaaatggcccgcctggcattatgcccagtacatgaccttatgggactttcctacttggcagtacatctacgtattagtcatcgctattaccatgtcgaggccacgttctgcttcactctccccatctcccccccctccccacccccaattttgtatttatttattttttaattattttgtgcagcgatgggggcggggggggggggcgcgcgccaggcggggcggggcggggcgaggggcggggcggggcgaggcggagaggtgcggcggcagccaatcagagcggcgcgctccgaaagtttccttttatggcgaggcggcggcggcggcggccctataaaaagcgaagcgcgcggcgggcgggagcaagcttgaactgaaaaaccagaaagttaactggtaagtttagtctttttgtcttttatttcaggtcccggatccggtggtggtgcaaatcaaagaactgctcctcagtggatgttgcctttacttctaggcctgtacggaagtgttacttctgctctaaaagctgcggaattgtacccgcggccgatccaccggtatgtggactctgggtcgcagagcggtggcaggcttgctggcatctccgtccccggctcaggcccagaccctgacacgggtgcccaggccggccgagctggctcctctgtgcggccggcgcggccttagaacagacattgacgcaacctgcacccccagaagagccagttccaaccagcgcgggttgaatcagatctggaacgtcaagaagcagagtgtgtaccttatgaatctccggaaaagtggcaccctcggacaccccggatccctcgatgaaaccacttatgagcgcctggccgaggaaaccctggattccctggctgagttcttcgaggacctggctgacaaaccctacaccttcgaagactacgacgtttccttcggaagtggggtgctgacggtcaaacttggtggcgatcttggaacctatgttataaacaagcagactcccaacaaacagatctggctcagctctccaagttcaggacccaagaggtatgactggacgggcaagaattgggtctattctcacgacggagtgagccttcatgaactgttggctgccgaactgacaaaagcccttaagacgaaactggacctgtcctcattggcgtactctggtaaggatgcctaactcgaggacggggtgaactacgcctgaggatccgatctttttccctctgccaaaaattatggggacatcatgaagccccttgagcatctgacttctggctaataaaggaaatttattttcattgcaatagtgtgttggaattttttgtgtctctcactcggaagcaattcgttgatctgaatttcgaccacccataatacccattaccctggtagataagtagcatggcgggttaatcattaactacaaggaacccctagtgatggagttggccactccctctctgcgcgctcgctcgctcactgaggccgggcgaccaaaggtcgcccgacgcccgggctttgcccgggcggcctcagtgagcgagcgagcgcgcagccttaattaacctaattcactggccgtcgttttacaacgtcgtgactgggaaaaccctggcgttacccaacttaatcgccttgcagcacatccccctttcgccagctggcgtaatagcgaagaggcccgcaccgatcgcccttcccaacagttgcgcagcctgaatggcgaatgggacgcgccctgtagcggcgcattaagcgcggcgggtgtggtggttacgcgcagcgtgaccgctacacttgccagcgccctagcgcccgctcctttcgctttcttcccttcctttctcgccacgttcgccggctttccccgtcaagctctaaatcgggggctccctttagggttccgatttagtgctttacggcacctcgaccccaaaaaacttgattagggtgatggttcacgtagtgggccatcgccctgatagacggtttttcgccctttgacgttggagtccacgttctttaatagtggactcttgttccaaactggaacaacactcaaccctatctcggtctattcttttgatttataagggattttgccgatttcggcctattggttaaaaaatgagctgatttaacaaaaatttaacgcgaattttaacaaaatattaacgcttacaatttaggtggcacttttcggggaaatgtgcgcggaacccctatttgtttatttttctaaatacattcaaatatgtatccgctcatgagacaataaccctgataaatgcttcaataatattgaaaaaggaagagtatgagtattcaacatttccgtgtcgcccttattcccttttttgcggcattttgccttcctgtttttgctcacccagaaacgctggtgaaagtaaaagatgctgaagatcagttgggtgcacgagtgggttacatcgaactggatctcaacagcggtaagatccttgagagttttcgccccgaagaacgttttccaatgatgagcacttttaaagttctgctatgtggcgcggtattatcccgtattgacgccgggcaagagcaactcggtcgccgcatacactattctcagaatgacttggttgagtactcaccagtcacagaaaagcatcttacggatggcatgacagtaagagaattatgcagtgctgccataaccatgagtgataacactgcggccaacttacttctgacaacgatcggaggaccgaaggagctaaccgcttttttgcacaacatgggggatcatgtaactcgccttgatcgttgggaaccggagctgaatgaagccataccaaacgacgagcgtgacaccacgatgcctgtagcaatggcaacaacgttgcgcaaactattaactggcgaactacttactctagcttcccggcaacaattaatagactggatggaggcggataaagttgcaggaccacttctgcgctcggcccttccggctggctggtttattgctgataaatctggagccggtgagcgtgggtctcgcggtatcattgcagcactggggccagatggtaagccctcccgtatcgtagttatctacacgacggggagtcaggcaactatggatgaacgaaatagacagatcgctgagataggtgcctcactgattaagcattggtaactgtcagaccaagtttactcatatatactttagattgatttaaaacttcatttttaatttaaaaggatctaggtgaagatcctttttgataatctcatgaccaaaatcccttaacgtgagttttcgttccactgagcgtcagaccccgtagaaaagatcaaaggatcttcttgagatcctttttttctgcgcgtaatctgctgcttgcaaacaaaaaaaccaccgctaccagcggtggtttgtttgccggatcaagagctaccaactctttttccgaaggtaactggcttcagcagagcgcagataccaaatactgttcttctagtgtagccgtagttaggccaccacttcaagaactctgtagcaccgcctacatacctcgctctgctaatcctgttaccagtggctgctgccagtggcgataagtcgtgtcttaccgggttggactcaagacgatagttaccggataaggcgcagcggtcgggctgaacggggggttcgtgcacacagcccagcttggagcgaacgacctacaccgaactgagatacctacagcgtgagctatgagaaagcgccacgcttcccgaagggagaaaggcggacaggtatccggtaagcggcagggtcggaacaggagagcgcacgagggagcttccagggggaaacgcctggtatctttatagtcctgtcgggtttcgccacctctgacttgagcgtcgatttttgtgatgctcgtcaggggggcggagcctatggaaaaacgccagcaacgcggcctttttacggttcctggccttttgctggccttttgctcacatgttctttcctgcgttatcccctgattctgtggataaccgtattaccgcctttgagtgagctgataccgctcgccgcagccgaacgaccgagcgcagcgagtcagtgagcgaggaagcggaagagcgcccaatacgcaaaccgcctctccccgcgcgttggccgattcattaatgcagctggcacgacaggtttcccgactggaaagcgggcagtgagcgcaacgcaattaatgtgagttagctcactcattaggcaccccaggctttacactttatgcttccggctcgtatgttgtgtggaattgtgagcggataacaatttcacacaggaaacagctatgaccatgattacgccagatttaattaag

SEQ ID NO: 15 - DNA, 4883 bp, Artificial Sequence
  Description of Artificial Sequence: Synthetic polynucleotide
gccttaattaggctgcgcgctcgctcgctcactgaggccgcccgggcaaagcccgggcgtcgggcgacctttggtcgcccggcctcagtgagcgagcgagcgcgcagagagggagtggccaactccatcactaggggttccttgtagttaatgattaacccgccatgctacttatctaccagggtaatggggatcctctagaactatagctagtcgacattgattattgactagttattaatagtaatcaattacggggtcattagttcatagcccatatatggagttccgcgttacataacttacggtaaatggcccgcctggctgaccgcccaacgacccccgcccattgacgtcaataatgacgtatgttcccatagtaacgccaatagggactttccattgacgtcaatgggtggagtatttacggtaaactgcccacttggcagtacatcaagtgtatcatatgccaagtacgccccctattgacgtcaatgacggtaaatggcccgcctggcattatgcccagtacatgaccttatgggactttcctacttggcagtacatctacgtattagtcatcgctattaccatgtcgaggccacgttctgcttcactctccccatctcccccccctccccacccccaattttgtatttatttattttttaattattttgtgcagcgatgggggcggggggggggggcgcgcgccaggcggggcggggcggggcgaggggcggggcggggcgaggcggagaggtgcggcggcagccaatcagagcggcgcgctccgaaagtttccttttatggcgaggcggcggcggcggcggccctataaaaagcgaagcgcgcggcgggcgggagcaagcttgaactgaaaaaccagaaagttaactggtaagtttagtctttttgtcttttatttcaggtcccggatccggtggtggtgcaaatcaaagaactgctcctcagtggatgttgcctttacttctaggcctgtacggaagtgttacttctgctctaaaagctgcggaattgtacccgcggccgatccaccggtatgtggacgctggggcggcgcgcagtggctggcctgctggcctcaccgtcaccggcgcaggcacaaaccctgaccagagtaccaaggcccgctgagcttgcacccctttgtggacggcgcggcctgagaaccgacattgatgctacctgcaccccgcgcagggctagctctaaccagcgaggtctgaatcagatttggaacgtcaaaaaacagtctgtttacctgatgaacctgcgaaaaagcggcacccttggccatccaggcagtttggacgaaactacttatgagcgactggccgaagagaccctggactctctggccgagtttttcgaggatctcgccgataagccctatactttcgaggattacgacgtaagcttcggatcaggggtgctgactgtgaaattgggtggagatctcggtacctatgtcatcaataaacagacgcctaataaacagatttggctttctagcccttcctcaggccccaagcgctatgactggaccggaaaaaattgggtgtacagccacgacggtgttagccttcacgaactgctggcagccgagctgactaaagccttgaagactaaattggacttgtccagccttgcctacagtgggaaagacgcttgactcgaggacggggtgaactacgcctgaggatccgatctttttccctctgccaaaaattatggggacatcatgaagccccttgagcatctgacttctggctaataaaggaaatttattttcattgcaatagtgtgttggaattttttgtgtctctcactcggaagcaattcgttgatctgaatttcgaccacccataatacccattaccctggtagataagtagcatggcgggttaatcattaactacaaggaacccctagtgatggagttggccactccctctctgcgcgctcgctcgctcactgaggccgggcgaccaaaggtcgcccgacgcccgggctttgcccgggcggcctcagtgagcgagcgagcgcgcagccttaattaacctaattcactggccgtcgttttacaacgtcgtgactgggaaaaccctggcgttacccaacttaatcgccttgcagcacatccccctttcgccagctggcgtaatagcgaagaggcccgcaccgatcgcccttcccaacagttgcgcagcctgaatggcgaatgggacgcgccctgtagcggcgcattaagcgcggcgggtgtggtggttacgcgcagcgtgaccgctacacttgccagcgccctagcgcccgctcctttcgctttcttcccttcctttctcgccacgttcgccggctttccccgtcaagctctaaatcgggggctccctttagggttccgatttagtgctttacggcacctcgaccccaaaaaacttgattagggtgatggttcacgtagtgggccatcgccctgatagacggtttttcgccctttgacgttggagtccacgttctttaatagtggactcttgttccaaactggaacaacactcaaccctatctcggtctattcttttgatttataagggattttgccgatttcggcctattggttaaaaaatgagctgatttaacaaaaatttaacgcgaattttaacaaaatattaacgcttacaatttaggtggcacttttcggggaaatgtgcgcggaacccctatttgtttatttttctaaatacattcaaatatgtatccgctcatgagacaataaccctgataaatgcttcaataatattgaaaaaggaagagtatgagtattcaacatttccgtgtcgcccttattcccttttttgcggcattttgccttcctgtttttgctcacccagaaacgctggtgaaagtaaaagatgctgaagatcagttgggtgcacgagtgggttacatcgaactggatctcaacagcggtaagatccttgagagttttcgccccgaagaacgttttccaatgatgagcacttttaaagttctgctatgtggcgcggtattatcccgtattgacgccgggcaagagcaactcggtcgccgcatacactattctcagaatgacttggttgagtactcaccagtcacagaaaagcatcttacggatggcatgacagtaagagaattatgcagtgctgccataaccatgagtgataacactgcggccaacttacttctgacaacgatcggaggaccgaaggagctaaccgcttttttgcacaacatgggggatcatgtaactcgccttgatcgttgggaaccggagctgaatgaagccataccaaacgacgagcgtgacaccacgatgcctgtagcaatggcaacaacgttgcgcaaactattaactggcgaactacttactctagcttcccggcaacaattaatagactggatggaggcggataaagttgcaggaccacttctgcgctcggcccttccggctggctggtttattgctgataaatctggagccggtgagcgtgggtctcgcggtatcattgcagcactggggccagatggtaagccctcccgtatcgtagttatctacacgacggggagtcaggcaactatggatgaacgaaatagacagatcgctgagataggtgcctcactgattaagcattggtaactgtcagaccaagtttactcatatatactttagattgatttaaaacttcatttttaatttaaaaggatctaggtgaagatcctttttgataatctcatgaccaaaatcccttaacgtgagttttcgttccactgagcgtcagaccccgtagaaaagatcaaaggatcttcttgagatcctttttttctgcgcgtaatctgctgcttgcaaacaaaaaaaccaccgctaccagcggtggtttgtttgccggatcaagagctaccaactctttttccgaaggtaactggcttcagcagagcgcagataccaaatactgttcttctagtgtagccgtagttaggccaccacttcaagaactctgtagcaccgcctacatacctcgctctgctaatcctgttaccagtggctgctgccagtggcgataagtcgtgtcttaccgggttggactcaagacgatagttaccggataaggcgcagcggtcgggctgaacggggggttcgtgcacacagcccagcttggagcgaacgacctacaccgaactgagatacctacagcgtgagctatgagaaagcgccacgcttcccgaagggagaaaggcggacaggtatccggtaagcggcagggtcggaacaggagagcgcacgagggagcttccagggggaaacgcctggtatctttatagtcctgtcgggtttcgccacctctgacttgagcgtcgatttttgtgatgctcgtcaggggggcggagcctatggaaaaacgccagcaacgcggcctttttacggttcctggccttttgctggccttttgctcacatgttctttcctgcgttatcccctgattctgtggataaccgtattaccgcctttgagtgagctgataccgctcgccgcagccgaacgaccgagcgcagcgagtcagtgagcgaggaagcggaagagcgcccaatacgcaaaccgcctctccccgcgcgttggccgattcattaatgcagctggcacgacaggtttcccgactggaaagcgggcagtgagcgcaacgcaattaatgtgagttagctcactcattaggcaccccaggctttacactttatgcttccggctcgtatgttgtgtggaattgtgagcggataacaatttcacacaggaaacagctatgaccatgattacgccagatttaattaag

SEQ ID NO: 16 - DNA, 4883 bp, Artificial Sequence
  Description of Artificial Sequence: Synthetic polynucleotide
gccttaattaggctgcgcgctcgctcgctcactgaggccgcccgggcaaagcccgggcgtcgggcgacctttggtcgcccggcctcagtgagcgagcgagcgcgcagagagggagtggccaactccatcactaggggttccttgtagttaatgattaacccgccatgctacttatctaccagggtaatggggatcctctagaactatagctagtcgacattgattattgactagttattaatagtaatcaattacggggtcattagttcatagcccatatatggagttccgcgttacataacttacggtaaatggcccgcctggctgaccgcccaacgacccccgcccattgacgtcaataatgacgtatgttcccatagtaacgccaatagggactttccattgacgtcaatgggtggagtatttacggtaaactgcccacttggcagtacatcaagtgtatcatatgccaagtacgccccctattgacgtcaatgacggtaaatggcccgcctggcattatgcccagtacatgaccttatgggactttcctacttggcagtacatctacgtattagtcatcgctattaccatgtcgaggccacgttctgcttcactctccccatctcccccccctccccacccccaattttgtatttatttattttttaattattttgtgcagcgatgggggcggggggggggggcgcgcgccaggcggggcggggcggggcgaggggcggggcggggcgaggcggagaggtgcggcggcagccaatcagagcggcgcgctccgaaagtttccttttatggcgaggcggcggcggcggcggccctataaaaagcgaagcgcgcggcgggcgggagcaagcttgaactgaaaaaccagaaagttaactggtaagtttagtctttttgtcttttatttcaggtcccggatccggtggtggtgcaaatcaaagaactgctcctcagtggatgttgcctttacttctaggcctgtacggaagtgttacttctgctctaaaagctgcggaattgtacccgcggccgatccaccggtatgtggactctggggaggcgcgccgttgccggactcctggcatctccaagcccagcgcaggctcaaaccctcacgcgcgttcccaggccagccgagttggcccccctttgtggcaggcgcggcctgaggacagatatcgacgccacatgcactcctcgccgcgcctccagcaatcaaaggggtttgaaccaaatttggaacgtcaagaagcaatcagtgtatctcatgaatctgagaaagagcggcacactcggtcatcccggaagtctggacgaaaccacatacgaacggctcgccgaggaaacgctggatagcctggccgagtttttcgaggacctggctgataaaccgtatactttcgaagattatgacgtgtcattcgggagcggcgtactgaccgtcaaattgggcggtgacctggggacatacgtgattaacaagcagactcctaataaacagatttggttgagctctccttccagcgggcctaaacgctatgattggacagggaagaattgggtttacagtcacgacggagttagccttcacgagctcttggcagcggagctgacaaaggcgctcaagaccaaactcgacctgtcttcactcgcctattcaggcaaagacgcctgactcgaggacggggtgaactacgcctgaggatccgatctttttccctctgccaaaaattatggggacatcatgaagccccttgagcatctgacttctggctaataaaggaaatttattttcattgcaatagtgtgttggaattttttgtgtctctcactcggaagcaattcgttgatctgaatttcgaccacccataatacccattaccctggtagataagtagcatggcgggttaatcattaactacaaggaacccctagtgatggagttggccactccctctctgcgcgctcgctcgctcactgaggccgggcgaccaaaggtcgcccgacgcccgggctttgcccgggcggcctcagtgagcgagcgagcgcgcagccttaattaacctaattcactggccgtcgttttacaacgtcgtgactgggaaaaccctggcgttacccaacttaatcgccttgcagcacatccccctttcgccagctggcgtaatagcgaagaggcccgcaccgatcgcccttcccaacagttgcgcagcctgaatggcgaatgggacgcgccctgtagcggcgcattaagcgcggcgggtgtggtggttacgcgcagcgtgaccgctacacttgccagcgccctagcgcccgctcctttcgctttcttcccttcctttctcgccacgttcgccggctttccccgtcaagctctaaatcgggggctccctttagggttccgatttagtgctttacggcacctcgaccccaaaaaacttgattagggtgatggttcacgtagtgggccatcgccctgatagacggtttttcgccctttgacgttggagtccacgttctttaatagtggactcttgttccaaactggaacaacactcaaccctatctcggtctattcttttgatttataagggattttgccgatttcggcctattggttaaaaaatgagctgatttaacaaaaatttaacgcgaattttaacaaaatattaacgcttacaatttaggtggcacttttcggggaaatgtgcgcggaacccctatttgtttatttttctaaatacattcaaatatgtatccgctcatgagacaataaccctgataaatgcttcaataatattgaaaaaggaagagtatgagtattcaacatttccgtgtcgcccttattcccttttttgcggcattttgccttcctgtttttgctcacccagaaacgctggtgaaagtaaaagatgctgaagatcagttgggtgcacgagtgggttacatcgaactggatctcaacagcggtaagatccttgagagttttcgccccgaagaacgttttccaatgatgagcacttttaaagttctgctatgtggcgcggtattatcccgtattgacgccgggcaagagcaactcggtcgccgcatacactattctcagaatgacttggttgagtactcaccagtcacagaaaagcatcttacggatggcatgacagtaagagaattatgcagtgctgccataaccatgagtgataacactgcggccaacttacttctgacaacgatcggaggaccgaaggagctaaccgcttttttgcacaacatgggggatcatgtaactcgccttgatcgttgggaaccggagctgaatgaagccataccaaacgacgagcgtgacaccacgatgcctgtagcaatggcaacaacgttgcgcaaactattaactggcgaactacttactctagcttcccggcaacaattaatagactggatggaggcggataaagttgcaggaccacttctgcgctcggcccttccggctggctggtttattgctgataaatctggagccggtgagcgtgggtctcgcggtatcattgcagcactggggccagatggtaagccctcccgtatcgtagttatctacacgacggggagtcaggcaactatggatgaacgaaatagacagatcgctgagataggtgcctcactgattaagcattggtaactgtcagaccaagtttactcatatatactttagattgatttaaaacttcatttttaatttaaaaggatctaggtgaagatcctttttgataatctcatgaccaaaatcccttaacgtgagttttcgttccactgagcgtcagaccccgtagaaaagatcaaaggatcttcttgagatcctttttttctgcgcgtaatctgctgcttgcaaacaaaaaaaccaccgctaccagcggtggtttgtttgccggatcaagagctaccaactctttttccgaaggtaactggcttcagcagagcgcagataccaaatactgttcttctagtgtagccgtagttaggccaccacttcaagaactctgtagcaccgcctacatacctcgctctgctaatcctgttaccagtggctgctgccagtggcgataagtcgtgtcttaccgggttggactcaagacgatagttaccggataaggcgcagcggtcgggctgaacggggggttcgtgcacacagcccagcttggagcgaacgacctacaccgaactgagatacctacagcgtgagctatgagaaagcgccacgcttcccgaagggagaaaggcggacaggtatccggtaagcggcagggtcggaacaggagagcgcacgagggagcttccagggggaaacgcctggtatctttatagtcctgtcgggtttcgccacctctgacttgagcgtcgatttttgtgatgctcgtcaggggggcggagcctatggaaaaacgccagcaacgcggcctttttacggttcctggccttttgctggccttttgctcacatgttctttcctgcgttatcccctgattctgtggataaccgtattaccgcctttgagtgagctgataccgctcgccgcagccgaacgaccgagcgcagcgagtcagtgagcgaggaagcggaagagcgcccaatacgcaaaccgcctctccccgcgcgttggccgattcattaatgcagctggcacgacaggtttcccgactggaaagcgggcagtgagcgcaacgcaattaatgtgagttagctcactcattaggcaccccaggctttacactttatgcttccggctcgtatgttgtgtggaattgtgagcggataacaatttcacacaggaaacagctatgaccatgattacgccagatttaattaag

SEQ ID NO: 17 - DNA, 4883 bp, Artificial Sequence
  Description of Artificial Sequence: Synthetic polynucleotide
gccttaattaggctgcgcgctcgctcgctcactgaggccgcccgggcaaagcccgggcgtcgggcgacctttggtcgcccggcctcagtgagcgagcgagcgcgcagagagggagtggccaactccatcactaggggttccttgtagttaatgattaacccgccatgctacttatctaccagggtaatggggatcctctagaactatagctagtcgacattgattattgactagttattaatagtaatcaattacggggtcattagttcatagcccatatatggagttccgcgttacataacttacggtaaatggcccgcctggctgaccgcccaacgacccccgcccattgacgtcaataatgacgtatgttcccatagtaacgccaatagggactttccattgacgtcaatgggtggagtatttacggtaaactgcccacttggcagtacatcaagtgtatcatatgccaagtacgccccctattgacgtcaatgacggtaaatggcccgcctggcattatgcccagtacatgaccttatgggactttcctacttggcagtacatctacgtattagtcatcgctattaccatgtcgaggccacgttctgcttcactctccccatctcccccccctccccacccccaattttgtatttatttattttttaattattttgtgcagcgatgggggcggggggggggggcgcgcgccaggcggggcggggcggggcgaggggcggggcggggcgaggcggagaggtgcggcggcagccaatcagagcggcgcgctccgaaagtttccttttatggcgaggcggcggcggcggcggccctataaaaagcgaagcgcgcggcgggcgggagcaagcttgaactgaaaaaccagaaagttaactggtaagtttagtctttttgtcttttatttcaggtcccggatccggtggtggtgcaaatcaaagaactgctcctcagtggatgttgcctttacttctaggcctgtacggaagtgttacttctgctctaaaagctgcggaattgtacccgcggccgatccaccggtatgtggacactgggccggcgggcggtcgccggcttgctcgcttccccctcccccgcccaggcacagacccttacccgcgtcccacgccctgccgaactggcccctctttgcggccgcagagggctgagaacggatattgacgccacatgtacacctcggagggcttccagtaaccagcgggggcttaaccagatctggaacgtgaaaaaacagagcgtgtatctcatgaatctcaggaaatccgggactcttggccaccctggctctctggacgaaacaacttacgaacggctggcggaagaaactttggattccttggccgagttctttgaagacctcgctgacaagccctatacctttgaggattatgacgtgagcttcggcagcggggtcctgaccgtaaagctggggggcgacctgggcacttatgtaattaacaagcagacccccaacaaacagatctggctcagtagtcccagttccggccctaaacgctacgattggaccgggaaaaattgggtttactcccacgacggcgtctccttgcacgagctcctggcagctgagctgaccaaagccctgaagaccaaactcgatttgagttctcttgcctattctggcaaagacgcataactcgaggacggggtgaactacgcctgaggatccgatctttttccctctgccaaaaattatggggacatcatgaagccccttgagcatctgacttctggctaataaaggaaatttattttcattgcaatagtgtgttggaattttttgtgtctctcactcggaagcaattcgttgatctgaatttcgaccacccataatacccattaccctggtagataagtagcatggcgggttaatcattaactacaaggaacccctagtgatggagttggccactccctctctgcgcgctcgctcgctcactgaggccgggcgaccaaaggtcgcccgacgcccgggctttgcccgggcggcctcagtgagcgagcgagcgcgcagccttaattaacctaattcactggccgtcgttttacaacgtcgtgactgggaaaaccctggcgttacccaacttaatcgccttgcagcacatccccctttcgccagctggcgtaatagcgaagaggcccgcaccgatcgcccttcccaacagttgcgcagcctgaatggcgaatgggacgcgccctgtagcggcgcattaagcgcggcgggtgtggtggttacgcgcagcgtgaccgctacacttgccagcgccctagcgcccgctcctttcgctttcttcccttcctttctcgccacgttcgccggctttccccgtcaagctctaaatcgggggctccctttagggttccgatttagtgctttacggcacctcgaccccaaaaaacttgattagggtgatggttcacgtagtgggccatcgccctgatagacggtttttcgccctttgacgttggagtccacgttctttaatagtggactcttgttccaaactggaacaacactcaaccctatctcggtctattcttttgatttataagggattttgccgatttcggcctattggttaaaaaatgagctgatttaacaaaaatttaacgcgaattttaacaaaatattaacgcttacaatttaggtggcacttttcggggaaatgtgcgcggaacccctatttgtttatttttctaaatacattcaaatatgtatccgctcatgagacaataaccctgataaatgcttcaataatattgaaaaaggaagagtatgagtattcaacatttccgtgtcgcccttattcccttttttgcggcattttgccttcctgtttttgctcacccagaaacgctggtgaaagtaaaagatgctgaagatcagttgggtgcacgagtgggttacatcgaactggatctcaacagcggtaagatccttgagagttttcgccccgaagaacgttttccaatgatgagcacttttaaagttctgctatgtggcgcggtattatcccgtattgacgccgggcaagagcaactcggtcgccgcatacactattctcagaatgacttggttgagtactcaccagtcacagaaaagcatcttacggatggcatgacagtaagagaattatgcagtgctgccataaccatgagtgataacactgcggccaacttacttctgacaacgatcggaggaccgaaggagctaaccgcttttttgcacaacatgggggatcatgtaactcgccttgatcgttgggaaccggagctgaatgaagccataccaaacgacgagcgtgacaccacgatgcctgtagcaatggcaacaacgttgcgcaaactattaactggcgaactacttactctagcttcccggcaacaattaatagactggatggaggcggataaagttgcaggaccacttctgcgctcggcccttccggctggctggtttattgctgataaatctggagccggtgagcgtgggtctcgcggtatcattgcagcactggggccagatggtaagccctcccgtatcgtagttatctacacgacggggagtcaggcaactatggatgaacgaaatagacagatcgctgagataggtgcctcactgattaagcattggtaactgtcagaccaagtttactcatatatactttagattgatttaaaacttcatttttaatttaaaaggatctaggtgaagatcctttttgataatctcatgaccaaaatcccttaacgtgagttttcgttccactgagcgtcagaccccgtagaaaagatcaaaggatcttcttgagatcctttttttctgcgcgtaatctgctgcttgcaaacaaaaaaaccaccgctaccagcggtggtttgtttgccggatcaagagctaccaactctttttccgaaggtaactggcttcagcagagcgcagataccaaatactgttcttctagtgtagccgtagttaggccaccacttcaagaactctgtagcaccgcctacatacctcgctctgctaatcctgttaccagtggctgctgccagtggcgataagtcgtgtcttaccgggttggactcaagacgatagttaccggataaggcgcagcggtcgggctgaacggggggttcgtgcacacagcccagcttggagcgaacgacctacaccgaactgagatacctacagcgtgagctatgagaaagcgccacgcttcccgaagggagaaaggcggacaggtatccggtaagcggcagggtcggaacaggagagcgcacgagggagcttccagggggaaacgcctggtatctttatagtcctgtcgggtttcgccacctctgacttgagcgtcgatttttgtgatgctcgtcaggggggcggagcctatggaaaaacgccagcaacgcggcctttttacggttcctggccttttgctggccttttgctcacatgttctttcctgcgttatcccctgattctgtggataaccgtattaccgcctttgagtgagctgataccgctcgccgcagccgaacgaccgagcgcagcgagtcagtgagcgaggaagcggaagagcgcccaatacgcaaaccgcctctccccgcgcgttggccgattcattaatgcagctggcacgacaggtttcccgactggaaagcgggcagtgagcgcaacgcaattaatgtgagttagctcactcattaggcaccccaggctttacactttatgcttccggctcgtatgttgtgtggaattgtgagcggataacaatttcacacaggaaacagctatgaccatgattacgccagatttaattaag

SEQ ID NO: 18 - DNA, 4883 bp, Artificial Sequence
  Description of Artificial Sequence: Synthetic polynucleotide
gccttaattaggctgcgcgctcgctcgctcactgaggccgcccgggcaaagcccgggcgtcgggcgacctttggtcgcccggcctcagtgagcgagcgagcgcgcagagagggagtggccaactccatcactaggggttccttgtagttaatgattaacccgccatgctacttatctaccagggtaatggggatcctctagaactatagctagtcgacattgattattgactagttattaatagtaatcaattacggggtcattagttcatagcccatatatggagttccgcgttacataacttacggtaaatggcccgcctggctgaccgcccaacgacccccgcccattgacgtcaataatgacgtatgttcccatagtaacgccaatagggactttccattgacgtcaatgggtggagtatttacggtaaactgcccacttggcagtacatcaagtgtatcatatgccaagtacgccccctattgacgtcaatgacggtaaatggcccgcctggcattatgcccagtacatgaccttatgggactttcctacttggcagtacatctacgtattagtcatcgctattaccatgtcgaggccacgttctgcttcactctccccatctcccccccctccccacccccaattttgtatttatttattttttaattattttgtgcagcgatgggggcggggggggggggcgcgcgccaggcggggcggggcggggcgaggggcggggcggggcgaggcggagaggtgcggcggcagccaatcagagcggcgcgctccgaaagtttccttttatggcgaggcggcggcggcggcggccctataaaaagcgaagcgcgcggcgggcgggagcaagcttgaactgaaaaaccagaaagttaactggtaagtttagtctttttgtcttttatttcaggtcccggatccggtggtggtgcaaatcaaagaactgctcctcagtggatgttgcctttacttctaggcctgtacggaagtgttacttctgctctaaaagctgcggaattgtacccgcggccgatccaccggtatgtggacactcggacgccgagccgtggcgggcttgcttgccagtcctagtcctgcacaggctcaaaccctgactcgcgtcccgcgaccagccgaactggccccgctgtgcgggcggagagggctcaggacagatattgatgctacctgtaccccgagaagggccagctcaaatcagagaggtctgaatcagatctggaacgtaaagaagcaatctgtgtatctgatgaacctccgcaagtcagggaccctgggtcaccctggcagcctcgatgagaccacatacgagcgcctggccgaagagacgttggactctttggcagagttcttcgaagacctcgctgataagccttacacatttgaggattacgacgtgtcttttggatctggggtgctcacagtgaagctggggggtgatctgggcacttacgtgattaacaagcagacccccaataaacaaatctggctcagttctccctcctccgggcctaagcggtatgactggactgggaagaactgggtttacagccacgatggtgtctctttgcacgaactcctggccgcggagctcactaaggcacttaagaccaagttggacctttcttccttggcatattccggcaaagacgcataactcgaggacggggtgaactacgcctgaggatccgatctttttccctctgccaaaaattatggggacatcatgaagccccttgagcatctgacttctggctaataaaggaaatttattttcattgcaatagtgtgttggaattttttgtgtctctcactcggaagcaattcgttgatctgaatttcgaccacccataatacccattaccctggtagataagtagcatggcgggttaatcattaactacaaggaacccctagtgatggagttggccactccctctctgcgcgctcgctcgctcactgaggccgggcgaccaaaggtcgcccgacgcccgggctttgcccgggcggcctcagtgagcgagcgagcgcgcagccttaattaacctaattcactggccgtcgttttacaacgtcgtgactgggaaaaccctggcgttacccaacttaatcgccttgcagcacatccccctttcgccagctggcgtaatagcgaagaggcccgcaccgatcgcccttcccaacagttgcgcagcctgaatggcgaatgggacgcgccctgtagcggcgcattaagcgcggcgggtgtggtggttacgcgcagcgtgaccgctacacttgccagcgccctagcgcccgctcctttcgctttcttcccttcctttctcgccacgttcgccggctttccccgtcaagctctaaatcgggggctccctttagggttccgatttagtgctttacggcacctcgaccccaaaaaacttgattagggtgatggttcacgtagtgggccatcgccctgatagacggtttttcgccctttgacgttggagtccacgttctttaatagtggactcttgttccaaactggaacaacactcaaccctatctcggtctattcttttgatttataagggattttgccgatttcggcctattggttaaaaaatgagctgatttaacaaaaatttaacgcgaattttaacaaaatattaacgcttacaatttaggtggcacttttcggggaaatgtgcgcggaacccctatttgtttatttttctaaatacattcaaatatgtatccgctcatgagacaataaccctgataaatgcttcaataatattgaaaaaggaagagtatgagtattcaacatttccgtgtcgcccttattcccttttttgcggcattttgccttcctgtttttgctcacccagaaacgctggtgaaagtaaaagatgctgaagatcagttgggtgcacgagtgggttacatcgaactggatctcaacagcggtaagatccttgagagttttcgccccgaagaacgttttccaatgatgagcacttttaaagttctgctatgtggcgcggtattatcccgtattgacgccgggcaagagcaactcggtcgccgcatacactattctcagaatgacttggttgagtactcaccagtcacagaaaagcatcttacggatggcatgacagtaagagaattatgcagtgctgccataaccatgagtgataacactgcggccaacttacttctgacaacgatcggaggaccgaaggagctaaccgcttttttgcacaacatgggggatcatgtaactcgccttgatcgttgggaaccggagctgaatgaagccataccaaacgacgagcgtgacaccacgatgcctgtagcaatggcaacaacgttgcgcaaactattaactggcgaactacttactctagcttcccggcaacaattaatagactggatggaggcggataaagttgcaggaccacttctgcgctcggcccttccggctggctggtttattgctgataaatctggagccggtgagcgtgggtctcgcggtatcattgcagcactggggccagatggtaagccctcccgtatcgtagttatctacacgacggggagtcaggcaactatggatgaacgaaatagacagatcgctgagataggtgcctcactgattaagcattggtaactgtcagaccaagtttactcatatatactttagattgatttaaaacttcatttttaatttaaaaggatctaggtgaagatcctttttgataatctcatgaccaaaatcccttaacgtgagttttcgttccactgagcgtcagaccccgtagaaaagatcaaaggatcttcttgagatcctttttttctgcgcgtaatctgctgcttgcaaacaaaaaaaccaccgctaccagcggtggtttgtttgccggatcaagagctaccaactctttttccgaaggtaactggcttcagcagagcgcagataccaaatactgttcttctagtgtagccgtagttaggccaccacttcaagaactctgtagcaccgcctacatacctcgctctgctaatcctgttaccagtggctgctgccagtggcgataagtcgtgtcttaccgggttggactcaagacgatagttaccggataaggcgcagcggtcgggctgaacggggggttcgtgcacacagcccagcttggagcgaacgacctacaccgaactgagatacctacagcgtgagctatgagaaagcgccacgcttcccgaagggagaaaggcggacaggtatccggtaagcggcagggtcggaacaggagagcgcacgagggagcttccagggggaaacgcctggtatctttatagtcctgtcgggtttcgccacctctgacttgagcgtcgatttttgtgatgctcgtcaggggggcggagcctatggaaaaacgccagcaacgcggcctttttacggttcctggccttttgctggccttttgctcacatgttctttcctgcgttatcccctgattctgtggataaccgtattaccgcctttgagtgagctgataccgctcgccgcagccgaacgaccgagcgcagcgagtcagtgagcgaggaagcggaagagcgcccaatacgcaaaccgcctctccccgcgcgttggccgattcattaatgcagctggcacgacaggtttcccgactggaaagcgggcagtgagcgcaacgcaattaatgtgagttagctcactcattaggcaccccaggctttacactttatgcttccggctcgtatgttgtgtggaattgtgagcggataacaatttcacacaggaaacagctatgaccatgattacgccagatttaattaag

SEQ ID NO: 19 - DNA, 4883 bp, Artificial Sequence
  Description of Artificial Sequence: Synthetic polynucleotide
gccttaattaggctgcgcgctcgctcgctcactgaggccgcccgggcaaagcccgggcgtcgggcgacctttggtcgcccggcctcagtgagcgagcgagcgcgcagagagggagtggccaactccatcactaggggttccttgtagttaatgattaacccgccatgctacttatctaccagggtaatggggatcctctagaactatagctagtcgacattgattattgactagttattaatagtaatcaattacggggtcattagttcatagcccatatatggagttccgcgttacataacttacggtaaatggcccgcctggctgaccgcccaacgacccccgcccattgacgtcaataatgacgtatgttcccatagtaacgccaatagggactttccattgacgtcaatgggtggagtatttacggtaaactgcccacttggcagtacatcaagtgtatcatatgccaagtacgccccctattgacgtcaatgacggtaaatggcccgcctggcattatgcccagtacatgaccttatgggactttcctacttggcagtacatctacgtattagtcatcgctattaccatgtcgaggccacgttctgcttcactctccccatctcccccccctccccacccccaattttgtatttatttattttttaattattttgtgcagcgatgggggcggggggggggggcgcgcgccaggcggggcggggcggggcgaggggcggggcggggcgaggcggagaggtgcggcggcagccaatcagagcggcgcgctccgaaagtttccttttatggcgaggcggcggcggcggcggccctataaaaagcgaagcgcgcggcgggcgggagcaagcttgaactgaaaaaccagaaagttaactggtaagtttagtctttttgtcttttatttcaggtcccggatccggtggtggtgcaaatcaaagaactgctcctcagtggatgttgcctttacttctaggcctgtacggaagtgttacttctgctctaaaagctgcggaattgtacccgcggccgatccaccggtatgtggacgcttggaaggcgggccgtggccggcctgcttgcatcaccgtctcctgctcaagctcagactttgactcgcgtgccaagaccagctgagctcgctccactttgcgggcgacgaggcctgaggactgatattgatgctacctgcaccccaaggcgcgcctcctcaaaccagagaggcctgaaccagatttggaatgttaagaagcagtctgtttacctcatgaacctccggaagtcagggacactgggacacccagggtcacttgacgagacaacctatgagagactggccgaagagaccctcgattcccttgcagaattcttcgaggatcttgctgataagccctatacctttgaagactatgacgtttcctttgggagtggtgtgctcaccgtcaaactggggggcgatctgggaacatacgtaatcaacaaacagactccaaataaacaaatttggctgtcaagccccagttctgggcctaagcggtatgactggactggtaagaactgggtttacagtcatgacggtgtgagcctgcacgaacttctggccgccgagcttacaaaggccctgaagacaaagctggatctgagcagtttggcctattctggcaaggacgcgtgactcgaggacggggtgaactacgcctgaggatccgatctttttccctctgccaaaaattatggggacatcatgaagccccttgagcatctgacttctggctaataaaggaaatttattttcattgcaatagtgtgttggaattttttgtgtctctcactcggaagcaattcgttgatctgaatttcgaccacccataatacccattaccctggtagataagtagcatggcgggttaatcattaactacaaggaacccctagtgatggagttggccactccctctctgcgcgctcgctcgctcactgaggccgggcgaccaaaggtcgcccgacgcccgggctttgcccgggcggcctcagtgagcgagcgagcgcgcagccttaattaacctaattcactggccgtcgttttacaacgtcgtgactgggaaaaccctggcgttacccaacttaatcgccttgcagcacatccccctttcgccagctggcgtaatagcgaagaggcccgcaccgatcgcccttcccaacagttgcgcagcctgaatggcgaatgggacgcgccctgtagcggcgcattaagcgcggcgggtgtggtggttacgcgcagcgtgaccgctacacttgccagcgccctagcgcccgctcctttcgctttcttcccttcctttctcgccacgttcgccggctttccccgtcaagctctaaatcgggggctccctttagggttccgatttagtgctttacggcacctcgaccccaaaaaacttgattagggtgatggttcacgtagtgggccatcgccctgatagacggtttttcgccctttgacgttggagtccacgttctttaatagtggactcttgttccaaactggaacaacactcaaccctatctcggtctattcttttgatttataagggattttgccgatttcggcctattggttaaaaaatgagctgatttaacaaaaatttaacgcgaattttaacaaaatattaacgcttacaatttaggtggcacttttcggggaaatgtgcgcggaacccctatttgtttatttttctaaatacattcaaatatgtatccgctcatgagacaataaccctgataaatgcttcaataatattgaaaaaggaagagtatgagtattcaacatttccgtgtcgcccttattcccttttttgcggcattttgccttcctgtttttgctcacccagaaacgctggtgaaagtaaaagatgctgaagatcagttgggtgcacgagtgggttacatcgaactggatctcaacagcggtaagatccttgagagttttcgccccgaagaacgttttccaatgatgagcacttttaaagttctgctatgtggcgcggtattatcccgtattgacgccgggcaagagcaactcggtcgccgcatacactattctcagaatgacttggttgagtactcaccagtcacagaaaagcatcttacggatggcatgacagtaagagaattatgcagtgctgccataaccatgagtgataacactgcggccaacttacttctgacaacgatcggaggaccgaaggagctaaccgcttttttgcacaacatgggggatcatgtaactcgccttgatcgttgggaaccggagctgaatgaagccataccaaacgacgagcgtgacaccacgatgcctgtagcaatggcaacaacgttgcgcaaactattaactggcgaactacttactctagcttcccggcaacaattaatagactggatggaggcggataaagttgcaggaccacttctgcgctcggcccttccggctggctggtttattgctgataaatctggagccggtgagcgtgggtctcgcggtatcattgcagcactggggccagatggtaagccctcccgtatcgtagttatctacacgacggggagtcaggcaactatggatgaacgaaatagacagatcgctgagataggtgcctcactgattaagcattggtaactgtcagaccaagtttactcatatatactttagattgatttaaaacttcatttttaatttaaaaggatctaggtgaagatcctttttgataatctcatgaccaaaatcccttaacgtgagttttcgttccactgagcgtcagaccccgtagaaaagatcaaaggatcttcttgagatcctttttttctgcgcgtaatctgctgcttgcaaacaaaaaaaccaccgctaccagcggtggtttgtttgccggatcaagagctaccaactctttttccgaaggtaactggcttcagcagagcgcagataccaaatactgttcttctagtgtagccgtagttaggccaccacttcaagaactctgtagcaccgcctacatacctcgctctgctaatcctgttaccagtggctgctgccagtggcgataagtcgtgtcttaccgggttggactcaagacgatagttaccggataaggcgcagcggtcgggctgaacggggggttcgtgcacacagcccagcttggagcgaacgacctacaccgaactgagatacctacagcgtgagctatgagaaagcgccacgcttcccgaagggagaaaggcggacaggtatccggtaagcggcagggtcggaacaggagagcgcacgagggagcttccagggggaaacgcctggtatctttatagtcctgtcgggtttcgccacctctgacttgagcgtcgatttttgtgatgctcgtcaggggggcggagcctatggaaaaacgccagcaacgcggcctttttacggttcctggccttttgctggccttttgctcacatgttctttcctgcgttatcccctgattctgtggataaccgtattaccgcctttgagtgagctgataccgctcgccgcagccgaacgaccgagcgcagcgagtcagtgagcgaggaagcggaagagcgcccaatacgcaaaccgcctctccccgcgcgttggccgattcattaatgcagctggcacgacaggtttcccgactggaaagcgggcagtgagcgcaacgcaattaatgtgagttagctcactcattaggcaccccaggctttacactttatgcttccggctcgtatgttgtgtggaattgtgagcggataacaatttcacacaggaaacagctatgaccatgattacgccagatttaattaag

SEQ ID NO: 20 - DNA, 4883 bp, Artificial Sequence
  Description of Artificial Sequence: Synthetic polynucleotide
gccttaattaggctgcgcgctcgctcgctcactgaggccgcccgggcaaagcccgggcgtcgggcgacctttggtcgcccggcctcagtgagcgagcgagcgcgcagagagggagtggccaactccatcactaggggttccttgtagttaatgattaacccgccatgctacttatctaccagggtaatggggatcctctagaactatagctagtcgacattgattattgactagttattaatagtaatcaattacggggtcattagttcatagcccatatatggagttccgcgttacataacttacggtaaatggcccgcctggctgaccgcccaacgacccccgcccattgacgtcaataatgacgtatgttcccatagtaacgccaatagggactttccattgacgtcaatgggtggagtatttacggtaaactgcccacttggcagtacatcaagtgtatcatatgccaagtacgccccctattgacgtcaatgacggtaaatggcccgcctggcattatgcccagtacatgaccttatgggactttcctacttggcagtacatctacgtattagtcatcgctattaccatgtcgaggccacgttctgcttcactctccccatctcccccccctccccacccccaattttgtatttatttattttttaattattttgtgcagcgatgggggcggggggggggggcgcgcgccaggcggggcggggcggggcgaggggcggggcggggcgaggcggagaggtgcggcggcagccaatcagagcggcgcgctccgaaagtttccttttatggcgaggcggcggcggcggcggccctataaaaagcgaagcgcgcggcgggcgggagcaagcttgaactgaaaaaccagaaagttaactggtaagtttagtctttttgtcttttatttcaggtcccggatccggtggtggtgcaaatcaaagaactgctcctcagtggatgttgcctttacttctaggcctgtacggaagtgttacttctgctctaaaagctgcggaattgtacccgcggccgatccaccggtatgtggacactcgggcgacgcgccgtggctgggctgcttgcttccccaagtcccgcacaggcgcaaaccctcacaagggtcccacggccagctgaattggccccgctgtgcggtcggaggggcctgcgaacagatatagacgcaacgtgcacccccagaagagcaagcagcaaccagagaggcctcaatcagatttggaacgtcaagaaacagagtgtctatctgatgaacctccgcaaatcagggacccttggtcatccgggatctcttgatgaaacgacctatgaacggctggctgaggagacgcttgactccctggcagagttcttcgaggatctggctgataagccatacacgttcgaggactatgatgtttcttttggttctggcgtcctgacggtgaaactcggaggggatctgggcacttacgttatcaacaaacagactcccaataaacagatttggttgtctagtcctagcagtggcccaaaacgctatgactggacgggcaagaactgggtgtactcccacgatggagttagcctgcacgaacttctggccgctgagcttactaaagcgctgaagactaagctggatctctccagcctcgcatacagcggcaaagacgcctagctcgaggacggggtgaactacgcctgaggatccgatctttttccctctgccaaaaattatggggacatcatgaagccccttgagcatctgacttctggctaataaaggaaatttattttcattgcaatagtgtgttggaattttttgtgtctctcactcggaagcaattcgttgatctgaatttcgaccacccataatacccattaccctggtagataagtagcatggcgggttaatcattaactacaaggaacccctagtgatggagttggccactccctctctgcgcgctcgctcgctcactgaggccgggcgaccaaaggtcgcccgacgcccgggctttgcccgggcggcctcagtgagcgagcgagcgcgcagccttaattaacctaattcactggccgtcgttttacaacgtcgtgactgggaaaaccctggcgttacccaacttaatcgccttgcagcacatccccctttcgccagctggcgtaatagcgaagaggcccgcaccgatcgcccttcccaacagttgcgcagcctgaatggcgaatgggacgcgccctgtagcggcgcattaagcgcggcgggtgtggtggttacgcgcagcgtgaccgctacacttgccagcgccctagcgcccgctcctttcgctttcttcccttcctttctcgccacgttcgccggctttccccgtcaagctctaaatcgggggctccctttagggttccgatttagtgctttacggcacctcgaccccaaaaaacttgattagggtgatggttcacgtagtgggccatcgccctgatagacggtttttcgccctttgacgttggagtccacgttctttaatagtggactcttgttccaaactggaacaacactcaaccctatctcggtctattcttttgatttataagggattttgccgatttcggcctattggttaaaaaatgagctgatttaacaaaaatttaacgcgaattttaacaaaatattaacgcttacaatttaggtggcacttttcggggaaatgtgcgcggaacccctatttgtttatttttctaaatacattcaaatatgtatccgctcatgagacaataaccctgataaatgcttcaataatattgaaaaaggaagagtatgagtattcaacatttccgtgtcgcccttattcccttttttgcggcattttgccttcctgtttttgctcacccagaaacgctggtgaaagtaaaagatgctgaagatcagttgggtgcacgagtgggttacatcgaactggatctcaacagcggtaagatccttgagagttttcgccccgaagaacgttttccaatgatgagcacttttaaagttctgctatgtggcgcggtattatcccgtattgacgccgggcaagagcaactcggtcgccgcatacactattctcagaatgacttggttgagtactcaccagtcacagaaaagcatcttacggatggcatgacagtaagagaattatgcagtgctgccataaccatgagtgataacactgcggccaacttacttctgacaacgatcggaggaccgaaggagctaaccgcttttttgcacaacatgggggatcatgtaactcgccttgatcgttgggaaccggagctgaatgaagccataccaaacgacgagcgtgacaccacgatgcctgtagcaatggcaacaacgttgcgcaaactattaactggcgaactacttactctagcttcccggcaacaattaatagactggatggaggcggataaagttgcaggaccacttctgcgctcggcccttccggctggctggtttattgctgataaatctggagccggtgagcgtgggtctcgcggtatcattgcagcactggggccagatggtaagccctcccgtatcgtagttatctacacgacggggagtcaggcaactatggatgaacgaaatagacagatcgctgagataggtgcctcactgattaagcattggtaactgtcagaccaagtttactcatatatactttagattgatttaaaacttcatttttaatttaaaaggatctaggtgaagatcctttttgataatctcatgaccaaaatcccttaacgtgagttttcgttccactgagcgtcagaccccgtagaaaagatcaaaggatcttcttgagatcctttttttctgcgcgtaatctgctgcttgcaaacaaaaaaaccaccgctaccagcggtggtttgtttgccggatcaagagctaccaactctttttccgaaggtaactggcttcagcagagcgcagataccaaatactgttcttctagtgtagccgtagttaggccaccacttcaagaactctgtagcaccgcctacatacctcgctctgctaatcctgttaccagtggctgctgccagtggcgataagtcgtgtcttaccgggttggactcaagacgatagttaccggataaggcgcagcggtcgggctgaacggggggttcgtgcacacagcccagcttggagcgaacgacctacaccgaactgagatacctacagcgtgagctatgagaaagcgccacgcttcccgaagggagaaaggcggacaggtatccggtaagcggcagggtcggaacaggagagcgcacgagggagcttccagggggaaacgcctggtatctttatagtcctgtcgggtttcgccacctctgacttgagcgtcgatttttgtgatgctcgtcaggggggcggagcctatggaaaaacgccagcaacgcggcctttttacggttcctggccttttgctggccttttgctcacatgttctttcctgcgttatcccctgattctgtggataaccgtattaccgcctttgagtgagctgataccgctcgccgcagccgaacgaccgagcgcagcgagtcagtgagcgaggaagcggaagagcgcccaatacgcaaaccgcctctccccgcgcgttggccgattcattaatgcagctggcacgacaggtttcccgactggaaagcgggcagtgagcgcaacgcaattaatgtgagttagctcactcattaggcaccccaggctttacactttatgcttccggctcgtatgttgtgtggaattgtgagcggataacaatttcacacaggaaacagctatgaccatgattacgccagatttaattaag

SEQ ID NO: 21 - DNA, 4883 bp, Artificial Sequence
  Description of Artificial Sequence: Synthetic polynucleotide
gccttaattaggctgcgcgctcgctcgctcactgaggccgcccgggcaaagcccgggcgtcgggcgacctttggtcgcccggcctcagtgagcgagcgagcgcgcagagagggagtggccaactccatcactaggggttccttgtagttaatgattaacccgccatgctacttatctaccagggtaatggggatcctctagaactatagctagtcgacattgattattgactagttattaatagtaatcaattacggggtcattagttcatagcccatatatggagttccgcgttacataacttacggtaaatggcccgcctggctgaccgcccaacgacccccgcccattgacgtcaataatgacgtatgttcccatagtaacgccaatagggactttccattgacgtcaatgggtggagtatttacggtaaactgcccacttggcagtacatcaagtgtatcatatgccaagtacgccccctattgacgtcaatgacggtaaatggcccgcctggcattatgcccagtacatgaccttatgggactttcctacttggcagtacatctacgtattagtcatcgctattaccatgtcgaggccacgttctgcttcactctccccatctcccccccctccccacccccaattttgtatttatttattttttaattattttgtgcagcgatgggggcggggggggggggcgcgcgccaggcggggcggggcggggcgaggggcggggcggggcgaggcggagaggtgcggcggcagccaatcagagcggcgcgctccgaaagtttccttttatggcgaggcggcggcggcggcggccctataaaaagcgaagcgcgcggcgggcgggagcaagcttgaactgaaaaaccagaaagttaactggtaagtttagtctttttgtcttttatttcaggtcccggatccggtggtggtgcaaatcaaagaactgctcctcagtggatgttgcctttacttctaggcctgtacggaagtgttacttctgctctaaaagctgcggaattgtacccgcggccgatccaccggtatgtggacactgggccggcgagcggtggccggactcctcgccagcccaagccctgctcaggctcagacactgactcgcgtgcctcgcccagccgagcttgcaccattgtgtggacgccggggactcagaactgacatagacgccacctgcactcctcgacgggcctcatctaaccagaggggcttgaatcaaatatggaatgtgaagaagcagtcagtctacctgatgaatttgcggaagagtgggaccttgggccacccaggttcccttgacgaaaccacctatgagcgacttgcggaagagaccctggacagtctggccgagttcttcgaggatttggcagataaaccatacacgttcgaagactacgacgtgagcttcggcagcggcgtactgacagttaaactcggcggtgacctggggacgtacgtgattaacaagcagacaccaaacaaacaaatttggttgtccagcccttcttccggaccaaaacggtacgattggacaggaaaaaattgggtttactcccatgacggcgtgagcctgcacgaactcctcgctgcggaactgacaaaggcacttaagaccaaactggacctctcaagcctggcctacagcggaaaagacgcatagctcgaggacggggtgaactacgcctgaggatccgatctttttccctctgccaaaaattatggggacatcatgaagccccttgagcatctgacttctggctaataaaggaaatttattttcattgcaatagtgtgttggaattttttgtgtctctcactcggaagcaattcgttgatctgaatttcgaccacccataatacccattaccctggtagataagtagcatggcgggttaatcattaactacaaggaacccctagtgatggagttggccactccctctctgcgcgctcgctcgctcactgaggccgggcgaccaaaggtcgcccgacgcccgggctttgcccgggcggcctcagtgagcgagcgagcgcgcagccttaattaacctaattcactggccgtcgttttacaacgtcgtgactgggaaaaccctggcgttacccaacttaatcgccttgcagcacatccccctttcgccagctggcgtaatagcgaagaggcccgcaccgatcgcccttcccaacagttgcgcagcctgaatggcgaatgggacgcgccctgtagcggcgcattaagcgcggcgggtgtggtggttacgcgcagcgtgaccgctacacttgccagcgccctagcgcccgctcctttcgctttcttcccttcctttctcgccacgttcgccggctttccccgtcaagctctaaatcgggggctccctttagggttccgatttagtgctttacggcacctcgaccccaaaaaacttgattagggtgatggttcacgtagtgggccatcgccctgatagacggtttttcgccctttgacgttggagtccacgttctttaatagtggactcttgttccaaactggaacaacactcaaccctatctcggtctattcttttgatttataagggattttgccgatttcggcctattggttaaaaaatgagctgatttaacaaaaatttaacgcgaattttaacaaaatattaacgcttacaatttaggtggcacttttcggggaaatgtgcgcggaacccctatttgtttatttttctaaatacattcaaatatgtatccgctcatgagacaataaccctgataaatgcttcaataatattgaaaaaggaagagtatgagtattcaacatttccgtgtcgcccttattcccttttttgcggcattttgccttcctgtttttgctcacccagaaacgctggtgaaagtaaaagatgctgaagatcagttgggtgcacgagtgggttacatcgaactggatctcaacagcggtaagatccttgagagttttcgccccgaagaacgttttccaatgatgagcacttttaaagttctgctatgtggcgcggtattatcccgtattgacgccgggcaagagcaactcggtcgccgcatacactattctcagaatgacttggttgagtactcaccagtcacagaaaagcatcttacggatggcatgacagtaagagaattatgcagtgctgccataaccatgagtgataacactgcggccaacttacttctgacaacgatcggaggaccgaaggagctaaccgcttttttgcacaacatgggggatcatgtaactcgccttgatcgttgggaaccggagctgaatgaagccataccaaacgacgagcgtgacaccacgatgcctgtagcaatggcaacaacgttgcgcaaactattaactggcgaactacttactctagcttcccggcaacaattaatagactggatggaggcggataaagttgcaggaccacttctgcgctcggcccttccggctggctggtttattgctgataaatctggagccggtgagcgtgggtctcgcggtatcattgcagcactggggccagatggtaagccctcccgtatcgtagttatctacacgacggggagtcaggcaactatggatgaacgaaatagacagatcgctgagataggtgcctcactgattaagcattggtaactgtcagaccaagtttactcatatatactttagattgatttaaaacttcatttttaatttaaaaggatctaggtgaagatcctttttgataatctcatgaccaaaatcccttaacgtgagttttcgttccactgagcgtcagaccccgtagaaaagatcaaaggatcttcttgagatcctttttttctgcgcgtaatctgctgcttgcaaacaaaaaaaccaccgctaccagcggtggtttgtttgccggatcaagagctaccaactctttttccgaaggtaactggcttcagcagagcgcagataccaaatactgttcttctagtgtagccgtagttaggccaccacttcaagaactctgtagcaccgcctacatacctcgctctgctaatcctgttaccagtggctgctgccagtggcgataagtcgtgtcttaccgggttggactcaagacgatagttaccggataaggcgcagcggtcgggctgaacggggggttcgtgcacacagcccagcttggagcgaacgacctacaccgaactgagatacctacagcgtgagctatgagaaagcgccacgcttcccgaagggagaaaggcggacaggtatccggtaagcggcagggtcggaacaggagagcgcacgagggagcttccagggggaaacgcctggtatctttatagtcctgtcgggtttcgccacctctgacttgagcgtcgatttttgtgatgctcgtcaggggggcggagcctatggaaaaacgccagcaacgcggcctttttacggttcctggccttttgctggccttttgctcacatgttctttcctgcgttatcccctgattctgtggataaccgtattaccgcctttgagtgagctgataccgctcgccgcagccgaacgaccgagcgcagcgagtcagtgagcgaggaagcggaagagcgcccaatacgcaaaccgcctctccccgcgcgttggccgattcattaatgcagctggcacgacaggtttcccgactggaaagcgggcagtgagcgcaacgcaattaatgtgagttagctcactcattaggcaccccaggctttacactttatgcttccggctcgtatgttgtgtggaattgtgagcggataacaatttcacacaggaaacagctatgaccatgattacgccagatttaattaag

SEQ ID NO: 22 - DNA, 4883 bp, Artificial Sequence
  Description of Artificial Sequence: Synthetic polynucleotide
gccttaattaggctgcgcgctcgctcgctcactgaggccgcccgggcaaagcccgggcgtcgggcgacctttggtcgcccggcctcagtgagcgagcgagcgcgcagagagggagtggccaactccatcactaggggttccttgtagttaatgattaacccgccatgctacttatctaccagggtaatggggatcctctagaactatagctagtcgacattgattattgactagttattaatagtaatcaattacggggtcattagttcatagcccatatatggagttccgcgttacataacttacggtaaatggcccgcctggctgaccgcccaacgacccccgcccattgacgtcaataatgacgtatgttcccatagtaacgccaatagggactttccattgacgtcaatgggtggagtatttacggtaaactgcccacttggcagtacatcaagtgtatcatatgccaagtacgccccctattgacgtcaatgacggtaaatggcccgcctggcattatgcccagtacatgaccttatgggactttcctacttggcagtacatctacgtattagtcatcgctattaccatgtcgaggccacgttctgcttcactctccccatctcccccccctccccacccccaattttgtatttatttattttttaattattttgtgcagcgatgggggcggggggggggggcgcgcgccaggcggggcggggcggggcgaggggcggggcggggcgaggcggagaggtgcggcggcagccaatcagagcggcgcgctccgaaagtttccttttatggcgaggcggcggcggcggcggccctataaaaagcgaagcgcgcggcgggcgggagcaagcttgaactgaaaaaccagaaagttaactggtaagtttagtctttttgtcttttatttcaggtcccggatccggtggtggtgcaaatcaaagaactgctcctcagtggatgttgcctttacttctaggcctgtacggaagtgttacttctgctctaaaagctgcggaattgtacccgcggccgatccaccggtatgtggactctgggtcgacgcgccgtagccggtctcttggcctccccatcccctgcgcaggcacagacccttacacgagttccacggcccgctgaactggcaccactctgcggacgccggggcctgagaaccgatattgacgctacgtgcactccccgacgagcctcttctaatcagagggggctcaaccagatctggaacgtgaagaagcagtcagtctacttgatgaatctgagaaagagcgggacccttgggcaccccgggtctctcgacgagactacatacgagaggctggccgaggagactttggactctctcgccgaattcttcgaggatttggcagacaagccgtacacctttgaagactacgatgtctcattcggatcaggggtgctgacggttaaactggggggcgatctcggaacctacgtcataaacaaacagacacccaataagcagatctggttgtctagcccatcatccggtcctaaacggtacgactggaccggcaagaactgggtctactcccatgacggagtcagtcttcatgaactgcttgccgcagagctgaccaaggctcttaagacgaaactggatctctctagcctggcctactccgggaaggatgcatagctcgaggacggggtgaactacgcctgaggatccgatctttttccctctgccaaaaattatggggacatcatgaagccccttgagcatctgacttctggctaataaaggaaatttattttcattgcaatagtgtgttggaattttttgtgtctctcactcggaagcaattcgttgatctgaatttcgaccacccataatacccattaccctggtagataagtagcatggcgggttaatcattaactacaaggaacccctagtgatggagttggccactccctctctgcgcgctcgctcgctcactgaggccgggcgaccaaaggtcgcccgacgcccgggctttgcccgggcggcctcagtgagcgagcgagcgcgcagccttaattaacctaattcactggccgtcgttttacaacgtcgtgactgggaaaaccctggcgttacccaacttaatcgccttgcagcacatccccctttcgccagctggcgtaatagcgaagaggcccgcaccgatcgcccttcccaacagttgcgcagcctgaatggcgaatgggacgcgccctgtagcggcgcattaagcgcggcgggtgtggtggttacgcgcagcgtgaccgctacacttgccagcgccctagcgcccgctcctttcgctttcttcccttcctttctcgccacgttcgccggctttccccgtcaagctctaaatcgggggctccctttagggttccgatttagtgctttacggcacctcgaccccaaaaaacttgattagggtgatggttcacgtagtgggccatcgccctgatagacggtttttcgccctttgacgttggagtccacgttctttaatagtggactcttgttccaaactggaacaacactcaaccctatctcggtctattcttttgatttataagggattttgccgatttcggcctattggttaaaaaatgagctgatttaacaaaaatttaacgcgaattttaacaaaatattaacgcttacaatttaggtggcacttttcggggaaatgtgcgcggaacccctatttgtttatttttctaaatacattcaaatatgtatccgctcatgagacaataaccctgataaatgcttcaataatattgaaaaaggaagagtatgagtattcaacatttccgtgtcgcccttattcccttttttgcggcattttgccttcctgtttttgctcacccagaaacgctggtgaaagtaaaagatgctgaagatcagttgggtgcacgagtgggttacatcgaactggatctcaacagcggtaagatccttgagagttttcgccccgaagaacgttttccaatgatgagcacttttaaagttctgctatgtggcgcggtattatcccgtattgacgccgggcaagagcaactcggtcgccgcatacactattctcagaatgacttggttgagtactcaccagtcacagaaaagcatcttacggatggcatgacagtaagagaattatgcagtgctgccataaccatgagtgataacactgcggccaacttacttctgacaacgatcggaggaccgaaggagctaaccgcttttttgcacaacatgggggatcatgtaactcgccttgatcgttgggaaccggagctgaatgaagccataccaaacgacgagcgtgacaccacgatgcctgtagcaatggcaacaacgttgcgcaaactattaactggcgaactacttactctagcttcccggcaacaattaatagactggatggaggcggataaagttgcaggaccacttctgcgctcggcccttccggctggctggtttattgctgataaatctggagccggtgagcgtgggtctcgcggtatcattgcagcactggggccagatggtaagccctcccgtatcgtagttatctacacgacggggagtcaggcaactatggatgaacgaaatagacagatcgctgagataggtgcctcactgattaagcattggtaactgtcagaccaagtttactcatatatactttagattgatttaaaacttcatttttaatttaaaaggatctaggtgaagatcctttttgataatctcatgaccaaaatcccttaacgtgagttttcgttccactgagcgtcagaccccgtagaaaagatcaaaggatcttcttgagatcctttttttctgcgcgtaatctgctgcttgcaaacaaaaaaaccaccgctaccagcggtggtttgtttgccggatcaagagctaccaactctttttccgaaggtaactggcttcagcagagcgcagataccaaatactgttcttctagtgtagccgtagttaggccaccacttcaagaactctgtagcaccgcctacatacctcgctctgctaatcctgttaccagtggctgctgccagtggcgataagtcgtgtcttaccgggttggactcaagacgatagttaccggataaggcgcagcggtcgggctgaacggggggttcgtgcacacagcccagcttggagcgaacgacctacaccgaactgagatacctacagcgtgagctatgagaaagcgccacgcttcccgaagggagaaaggcggacaggtatccggtaagcggcagggtcggaacaggagagcgcacgagggagcttccagggggaaacgcctggtatctttatagtcctgtcgggtttcgccacctctgacttgagcgtcgatttttgtgatgctcgtcaggggggcggagcctatggaaaaacgccagcaacgcggcctttttacggttcctggccttttgctggccttttgctcacatgttctttcctgcgttatcccctgattctgtggataaccgtattaccgcctttgagtgagctgataccgctcgccgcagccgaacgaccgagcgcagcgagtcagtgagcgaggaagcggaagagcgcccaatacgcaaaccgcctctccccgcgcgttggccgattcattaatgcagctggcacgacaggtttcccgactggaaagcgggcagtgagcgcaacgcaattaatgtgagttagctcactcattaggcaccccaggctttacactttatgcttccggctcgtatgttgtgtggaattgtgagcggataacaatttcacacaggaaacagctatgaccatgattacgccagatttaattaag

SEQ ID NO: 23 - DNA, 4883 bp, Artificial Sequence
  Description of Artificial Sequence: Synthetic polynucleotide
gccttaattaggctgcgcgctcgctcgctcactgaggccgcccgggcaaagcccgggcgtcgggcgacctttggtcgcccggcctcagtgagcgagcgagcgcgcagagagggagtggccaactccatcactaggggttccttgtagttaatgattaacccgccatgctacttatctaccagggtaatggggatcctctagaactatagctagtcgacattgattattgactagttattaatagtaatcaattacggggtcattagttcatagcccatatatggagttccgcgttacataacttacggtaaatggcccgcctggctgaccgcccaacgacccccgcccattgacgtcaataatgacgtatgttcccatagtaacgccaatagggactttccattgacgtcaatgggtggagtatttacggtaaactgcccacttggcagtacatcaagtgtatcatatgccaagtacgccccctattgacgtcaatgacggtaaatggcccgcctggcattatgcccagtacatgaccttatgggactttcctacttggcagtacatctacgtattagtcatcgctattaccatgtcgaggccacgttctgcttcactctccccatctcccccccctccccacccccaattttgtatttatttattttttaattattttgtgcagcgatgggggcggggggggggggcgcgcgccaggcggggcggggcggggcgaggggcggggcggggcgaggcggagaggtgcggcggcagccaatcagagcggcgcgctccgaaagtttccttttatggcgaggcggcggcggcggcggccctataaaaagcgaagcgcgcggcgggcgggagcaagcttgaactgaaaaaccagaaagttaactggtaagtttagtctttttgtcttttatttcaggtcccggatccggtggtggtgcaaatcaaagaactgctcctcagtggatgttgcctttacttctaggcctgtacggaagtgttacttctgctctaaaagctgcggaattgtacccgcggccgatccaccggtatgtggactctcgggcgacgcgccgtagccggtctcctggcttccccaagccctgcacaggcacagaccctcacacgggtcccacggccagctgaattggccccactctgcggtcgccggggcctgcgaaccgatatagacgcaacgtgcactccccgacgagcaagttccaaccagagagggctcaaccagatttggaacgtcaagaagcagagtgtctatttgatgaatctgagaaaatccgggacccttgggcaccccggatctcttgatgaaactacctatgaaaggctggccgaggagacgctggactctctggcagagttcttcgaggatctggcagacaagccatacacgtttgaggactatgatgtctcttttggatctggcgtcctgacggttaaactgggaggggatctcggaacctacgttatcaacaaacagactcccaataagcagatctggttgtctagtccatccagtggtcctaaacgctatgactggacgggcaagaactgggtgtactcccacgacggagttagccttcatgaactgctggccgcagagctgactaaagctcttaagactaaactggatctctctagcctggcctactccgggaaagatgcctagctcgaggacggggtgaactacgcctgaggatccgatctttttccctctgccaaaaattatggggacatcatgaagccccttgagcatctgacttctggctaataaaggaaatttattttcattgcaatagtgtgttggaattttttgtgtctctcactcggaagcaattcgttgatctgaatttcgaccacccataatacccattaccctggtagataagtagcatggcgggttaatcattaactacaaggaacccctagtgatggagttggccactccctctctgcgcgctcgctcgctcactgaggccgggcgaccaaaggtcgcccgacgcccgggctttgcccgggcggcctcagtgagcgagcgagcgcgcagccttaattaacctaattcactggccgtcgttttacaacgtcgtgactgggaaaaccctggcgttacccaacttaatcgccttgcagcacatccccctttcgccagctggcgtaatagcgaagaggcccgcaccgatcgcccttcccaacagttgcgcagcctgaatggcgaatgggacgcgccctgtagcggcgcattaagcgcggcgggtgtggtggttacgcgcagcgtgaccgctacacttgccagcgccctagcgcccgctcctttcgctttcttcccttcctttctcgccacgttcgccggctttccccgtcaagctctaaatcgggggctccctttagggttccgatttagtgctttacggcacctcgaccccaaaaaacttgattagggtgatggttcacgtagtgggccatcgccctgatagacggtttttcgccctttgacgttggagtccacgttctttaatagtggactcttgttccaaactggaacaacactcaaccctatctcggtctattcttttgatttataagggattttgccgatttcggcctattggttaaaaaatgagctgatttaacaaaaatttaacgcgaattttaacaaaatattaacgcttacaatttaggtggcacttttcggggaaatgtgcgcggaacccctatttgtttatttttctaaatacattcaaatatgtatccgctcatgagacaataaccctgataaatgcttcaataatattgaaaaaggaagagtatgagtattcaacatttccgtgtcgcccttattcccttttttgcggcattttgccttcctgtttttgctcacccagaaacgctggtgaaagtaaaagatgctgaagatcagttgggtgcacgagtgggttacatcgaactggatctcaacagcggtaagatccttgagagttttcgccccgaagaacgttttccaatgatgagcacttttaaagttctgctatgtggcgcggtattatcccgtattgacgccgggcaagagcaactcggtcgccgcatacactattctcagaatgacttggttgagtactcaccagtcacagaaaagcatcttacggatggcatgacagtaagagaattatgcagtgctgccataaccatgagtgataacactgcggccaacttacttctgacaacgatcggaggaccgaaggagctaaccgcttttttgcacaacatgggggatcatgtaactcgccttgatcgttgggaaccggagctgaatgaagccataccaaacgacgagcgtgacaccacgatgcctgtagcaatggcaacaacgttgcgcaaactattaactggcgaactacttactctagcttcccggcaacaattaatagactggatggaggcggataaagttgcaggaccacttctgcgctcggcccttccggctggctggtttattgctgataaatctggagccggtgagcgtgggtctcgcggtatcattgcagcactggggccagatggtaagccctcccgtatcgtagttatctacacgacggggagtcaggcaactatggatgaacgaaatagacagatcgctgagataggtgcctcactgattaagcattggtaactgtcagaccaagtttactcatatatactttagattgatttaaaacttcatttttaatttaaaaggatctaggtgaagatcctttttgataatctcatgaccaaaatcccttaacgtgagttttcgttccactgagcgtcagaccccgtagaaaagatcaaaggatcttcttgagatcctttttttctgcgcgtaatctgctgcttgcaaacaaaaaaaccaccgctaccagcggtggtttgtttgccggatcaagagctaccaactctttttccgaaggtaactggcttcagcagagcgcagataccaaatactgttcttctagtgtagccgtagttaggccaccacttcaagaactctgtagcaccgcctacatacctcgctctgctaatcctgttaccagtggctgctgccagtggcgataagtcgtgtcttaccgggttggactcaagacgatagttaccggataaggcgcagcggtcgggctgaacggggggttcgtgcacacagcccagcttggagcgaacgacctacaccgaactgagatacctacagcgtgagctatgagaaagcgccacgcttcccgaagggagaaaggcggacaggtatccggtaagcggcagggtcggaacaggagagcgcacgagggagcttccagggggaaacgcctggtatctttatagtcctgtcgggtttcgccacctctgacttgagcgtcgatttttgtgatgctcgtcaggggggcggagcctatggaaaaacgccagcaacgcggcctttttacggttcctggccttttgctggccttttgctcacatgttctttcctgcgttatcccctgattctgtggataaccgtattaccgcctttgagtgagctgataccgctcgccgcagccgaacgaccgagcgcagcgagtcagtgagcgaggaagcggaagagcgcccaatacgcaaaccgcctctccccgcgcgttggccgattcattaatgcagctggcacgacaggtttcccgactggaaagcgggcagtgagcgcaacgcaattaatgtgagttagctcactcattaggcaccccaggctttacactttatgcttccggctcgtatgttgtgtggaattgtgagcggataacaatttcacacaggaaacagctatgaccatgattacgccagatttaattaag

SEQ ID NO: 24 - DNA, 4883 bp, Artificial Sequence
  Description of Artificial Sequence: Synthetic polynucleotide
gccttaattaggctgcgcgctcgctcgctcactgaggccgcccgggcaaagcccgggcgtcgggcgacctttggtcgcccggcctcagtgagcgagcgagcgcgcagagagggagtggccaactccatcactaggggttccttgtagttaatgattaacccgccatgctacttatctaccagggtaatggggatcctctagaactatagctagtcgacattgattattgactagttattaatagtaatcaattacggggtcattagttcatagcccatatatggagttccgcgttacataacttacggtaaatggcccgcctggctgaccgcccaacgacccccgcccattgacgtcaataatgacgtatgttcccatagtaacgccaatagggactttccattgacgtcaatgggtggagtatttacggtaaactgcccacttggcagtacatcaagtgtatcatatgccaagtacgccccctattgacgtcaatgacggtaaatggcccgcctggcattatgcccagtacatgaccttatgggactttcctacttggcagtacatctacgtattagtcatcgctattaccatgtcgaggccacgttctgcttcactctccccatctcccccccctccccacccccaattttgtatttatttattttttaattattttgtgcagcgatgggggcggggggggggggcgcgcgccaggcggggcggggcggggcgaggggcggggcggggcgaggcggagaggtgcggcggcagccaatcagagcggcgcgctccgaaagtttccttttatggcgaggcggcggcggcggcggccctataaaaagcgaagcgcgcggcgggcgggagcaagcttgaactgaaaaaccagaaagttaactggtaagtttagtctttttgtcttttatttcaggtcccggatccggtggtggtgcaaatcaaagaactgctcctcagtggatgttgcctttacttctaggcctgtacggaagtgttacttctgctctaaaagctgcggaattgtacccgcggccgatccaccggtatgtggactctggggcgacgcgccgtggccgggctcctggcatccccatcccctgcgcaggcgcaaaccctcacacgggttccacggccagctgaactggccccactgtgcggccggcggggcctgagaacagatattgacgcaacgtgcactcccagaagagccagcagcaaccagagggggttgaatcagatctggaacgtcaagaagcagtcagtgtacctgatgaatctccgaaaaagcgggacccttggtcaccccggatctctcgatgaaaccacatatgaacggctggccgaggaaacgctggactccctggccgagttcttcgaggacctggcagacaagccgtacaccttcgaagactatgatgtttcattcggaagtggcgtgctgacggtcaaactgggaggcgatctgggaacctacgttataaacaaacagactcccaataaacagatctggttgtctagtccatccagcggtcctaaacgctatgactggacgggcaagaactgggtctactcccacgacggagttagccttcacgaactgttggccgcagagctgacaaaggcgcttaagacgaaactggatctctctagcctggcctactccggcaaagatgcctagctcgaggacggggtgaactacgcctgaggatccgatctttttccctctgccaaaaattatggggacatcatgaagccccttgagcatctgacttctggctaataaaggaaatttattttcattgcaatagtgtgttggaattttttgtgtctctcactcggaagcaattcgttgatctgaatttcgaccacccataatacccattaccctggtagataagtagcatggcgggttaatcattaactacaaggaacccctagtgatggagttggccactccctctctgcgcgctcgctcgctcactgaggccgggcgaccaaaggtcgcccgacgcccgggctttgcccgggcggcctcagtgagcgagcgagcgcgcagccttaattaacctaattcactggccgtcgttttacaacgtcgtgactgggaaaaccctggcgttacccaacttaatcgccttgcagcacatccccctttcgccagctggcgtaatagcgaagaggcccgcaccgatcgcccttcccaacagttgcgcagcctgaatggcgaatgggacgcgccctgtagcggcgcattaagcgcggcgggtgtggtggttacgcgcagcgtgaccgctacacttgccagcgccctagcgcccgctcctttcgctttcttcccttcctttctcgccacgttcgccggctttccccgtcaagctctaaatcgggggctccctttagggttccgatttagtgctttacggcacctcgaccccaaaaaacttgattagggtgatggttcacgtagtgggccatcgccctgatagacggtttttcgccctttgacgttggagtccacgttctttaatagtggactcttgttccaaactggaacaacactcaaccctatctcggtctattcttttgatttataagggattttgccgatttcggcctattggttaaaaaatgagctgatttaacaaaaatttaacgcgaattttaacaaaatattaacgcttacaatttaggtggcacttttcggggaaatgtgcgcggaacccctatttgtttatttttctaaatacattcaaatatgtatccgctcatgagacaataaccctgataaatgcttcaataatattgaaaaaggaagagtatgagtattcaacatttccgtgtcgcccttattcccttttttgcggcattttgccttcctgtttttgctcacccagaaacgctggtgaaagtaaaagatgctgaagatcagttgggtgcacgagtgggttacatcgaactggatctcaacagcggtaagatccttgagagttttcgccccgaagaacgttttccaatgatgagcacttttaaagttctgctatgtggcgcggtattatcccgtattgacgccgggcaagagcaactcggtcgccgcatacactattctcagaatgacttggttgagtactcaccagtcacagaaaagcatcttacggatggcatgacagtaagagaattatgcagtgctgccataaccatgagtgataacactgcggccaacttacttctgacaacgatcggaggaccgaaggagctaaccgcttttttgcacaacatgggggatcatgtaactcgccttgatcgttgggaaccggagctgaatgaagccataccaaacgacgagcgtgacaccacgatgcctgtagcaatggcaacaacgttgcgcaaactattaactggcgaactacttactctagcttcccggcaacaattaatagactggatggaggcggataaagttgcaggaccacttctgcgctcggcccttccggctggctggtttattgctgataaatctggagccggtgagcgtgggtctcgcggtatcattgcagcactggggccagatggtaagccctcccgtatcgtagttatctacacgacggggagtcaggcaactatggatgaacgaaatagacagatcgctgagataggtgcctcactgattaagcattggtaactgtcagaccaagtttactcatatatactttagattgatttaaaacttcatttttaatttaaaaggatctaggtgaagatcctttttgataatctcatgaccaaaatcccttaacgtgagttttcgttccactgagcgtcagaccccgtagaaaagatcaaaggatcttcttgagatcctttttttctgcgcgtaatctgctgcttgcaaacaaaaaaaccaccgctaccagcggtggtttgtttgccggatcaagagctaccaactctttttccgaaggtaactggcttcagcagagcgcagataccaaatactgttcttctagtgtagccgtagttaggccaccacttcaagaactctgtagcaccgcctacatacctcgctctgctaatcctgttaccagtggctgctgccagtggcgataagtcgtgtcttaccgggttggactcaagacgatagttaccggataaggcgcagcggtcgggctgaacggggggttcgtgcacacagcccagcttggagcgaacgacctacaccgaactgagatacctacagcgtgagctatgagaaagcgccacgcttcccgaagggagaaaggcggacaggtatccggtaagcggcagggtcggaacaggagagcgcacgagggagcttccagggggaaacgcctggtatctttatagtcctgtcgggtttcgccacctctgacttgagcgtcgatttttgtgatgctcgtcaggggggcggagcctatggaaaaacgccagcaacgcggcctttttacggttcctggccttttgctggccttttgctcacatgttctttcctgcgttatcccctgattctgtggataaccgtattaccgcctttgagtgagctgataccgctcgccgcagccgaacgaccgagcgcagcgagtcagtgagcgaggaagcggaagagcgcccaatacgcaaaccgcctctccccgcgcgttggccgattcattaatgcagctggcacgacaggtttcccgactggaaagcgggcagtgagcgcaacgcaattaatgtgagttagctcactcattaggcaccccaggctttacactttatgcttccggctcgtatgttgtgtggaattgtgagcggataacaatttcacacaggaaacagctatgaccatgattacgccagatttaattaag

SEQ ID NO: 25 - DNA, 4850 bp, Artificial Sequence
  Description of Artificial Sequence: Synthetic polynucleotide
gccttaattaggctgcgcgctcgctcgctcactgaggccgcccgggcaaagcccgggcgtcgggcgacctttggtcgcccggcctcagtgagcgagcgagcgcgcagagagggagtggccaactccatcactaggggttccttgtagttaatgattaacccgccatgctacttatctaccagggtaatggggatcctctagaactatagctagtcgacattgattattgactagttattaatagtaatcaattacggggtcattagttcatagcccatatatggagttccgcgttacataacttacggtaaatggcccgcctggctgaccgcccaacgacccccgcccattgacgtcaataatgacgtatgttcccatagtaacgccaatagggactttccattgacgtcaatgggtggagtatttacggtaaactgcccacttggcagtacatcaagtgtatcatatgccaagtacgccccctattgacgtcaatgacggtaaatggcccgcctggcattatgcccagtacatgaccttatgggactttcctacttggcagtacatctacgtattagtcatcgctattaccatgtcgaggccacgttctgcttcactctccccatctcccccccctccccacccccaattttgtatttatttattttttaattattttgtgcagcgatgggggcggggggggggggcgcgcgccaggcggggcggggcggggcgaggggcggggcggggcgaggcggagaggtgcggcggcagccaatcagagcggcgcgctccgaaagtttccttttatggcgaggcggcggcggcggcggccctataaaaagcgaagcgcgcggcgggcgggagcaagcttgaactgaaaaaccagaaagttaactggtaagtttagtctttttgtcttttatttcaggtcccggatccggtggtggtgcaaatcaaagaactgctcctcagtggatgttgcctttacttctaggcctgtacggaagtgttacttctgctctaaaagctgcggaattgtacccgcggccgatccaccggtgccgccaccatggcgccctacagcctactggtgactcggctgcagaaagctctgggtgtgcggcagtaccatgtggcctcagtcctgtgcctgcgcaccgacatcgatgcgacctgcacgccccgccgcgcaagttcgaaccaacgtggcctcaaccagatttggaatgtcaaaaagcagagtgtctatttgatgaatttgaggaaatctggaactttgggccacccaggctctctagatgagaccacctatgaaagactagcagaggaaacgctggactctttagcagagttttttgaagaccttgcagacaagccatacacgtttgaggactatgatgtctcctttgggagtggtgtcttaactgtcaaactgggtggagatctaggaacctatgtgatcaacaagcagacgccaaacaagcaaatctggctatcttctccatccagtggacctaagcgttatgactggactgggaaaaactgggtgttctcccacgacggcgtgtccctccatgagctgctggccgcagagctcactaaagccttaaaaaccaaactggacttgtcttggttggcctattccggaaaagatgcttgactcgaggacggggtgaactacgcctgaggatccgatctttttccctctgccaaaaattatggggacatcatgaagccccttgagcatctgacttctggctaataaaggaaatttattttcattgcaatagtgtgttggaattttttgtgtctctcactcggaagcaattcgttgatctgaatttcgaccacccataatacccattaccctggtagataagtagcatggcgggttaatcattaactacaaggaacccctagtgatggagttggccactccctctctgcgcgctcgctcgctcactgaggccgggcgaccaaaggtcgcccgacgcccgggctttgcccgggcggcctcagtgagcgagcgagcgcgcagccttaattaacctaattcactggccgtcgttttacaacgtcgtgactgggaaaaccctggcgttacccaacttaatcgccttgcagcacatccccctttcgccagctggcgtaatagcgaagaggcccgcaccgatcgcccttcccaacagttgcgcagcctgaatggcgaatgggacgcgccctgtagcggcgcattaagcgcggcgggtgtggtggttacgcgcagcgtgaccgctacacttgccagcgccctagcgcccgctcctttcgctttcttcccttcctttctcgccacgttcgccggctttccccgtcaagctctaaatcgggggctccctttagggttccgatttagtgctttacggcacctcgaccccaaaaaacttgattagggtgatggttcacgtagtgggccatcgccctgatagacggtttttcgccctttgacgttggagtccacgttctttaatagtggactcttgttccaaactggaacaacactcaaccctatctcggtctattcttttgatttataagggattttgccgatttcggcctattggttaaaaaatgagctgatttaacaaaaatttaacgcgaattttaacaaaatattaacgcttacaatttaggtggcacttttcggggaaatgtgcgcggaacccctatttgtttatttttctaaatacattcaaatatgtatccgctcatgagacaataaccctgataaatgcttcaataatattgaaaaaggaagagtatgagtattcaacatttccgtgtcgcccttattcccttttttgcggcattttgccttcctgtttttgctcacccagaaacgctggtgaaagtaaaagatgctgaagatcagttgggtgcacgagtgggttacatcgaactggatctcaacagcggtaagatccttgagagttttcgccccgaagaacgttttccaatgatgagcacttttaaagttctgctatgtggcgcggtattatcccgtattgacgccgggcaagagcaactcggtcgccgcatacactattctcagaatgacttggttgagtactcaccagtcacagaaaagcatcttacggatggcatgacagtaagagaattatgcagtgctgccataaccatgagtgataacactgcggccaacttacttctgacaacgatcggaggaccgaaggagctaaccgcttttttgcacaacatgggggatcatgtaactcgccttgatcgttgggaaccggagctgaatgaagccataccaaacgacgagcgtgacaccacgatgcctgtagcaatggcaacaacgttgcgcaaactattaactggcgaactacttactctagcttcccggcaacaattaatagactggatggaggcggataaagttgcaggaccacttctgcgctcggcccttccggctggctggtttattgctgataaatctggagccggtgagcgtgggtctcgcggtatcattgcagcactggggccagatggtaagccctcccgtatcgtagttatctacacgacggggagtcaggcaactatggatgaacgaaatagacagatcgctgagataggtgcctcactgattaagcattggtaactgtcagaccaagtttactcatatatactttagattgatttaaaacttcatttttaatttaaaaggatctaggtgaagatcctttttgataatctcatgaccaaaatcccttaacgtgagttttcgttccactgagcgtcagaccccgtagaaaagatcaaaggatcttcttgagatcctttttttctgcgcgtaatctgctgcttgcaaacaaaaaaaccaccgctaccagcggtggtttgtttgccggatcaagagctaccaactctttttccgaaggtaactggcttcagcagagcgcagataccaaatactgttcttctagtgtagccgtagttaggccaccacttcaagaactctgtagcaccgcctacatacctcgctctgctaatcctgttaccagtggctgctgccagtggcgataagtcgtgtcttaccgggttggactcaagacgatagttaccggataaggcgcagcggtcgggctgaacggggggttcgtgcacacagcccagcttggagcgaacgacctacaccgaactgagatacctacagcgtgagctatgagaaagcgccacgcttcccgaagggagaaaggcggacaggtatccggtaagcggcagggtcggaacaggagagcgcacgagggagcttccagggggaaacgcctggtatctttatagtcctgtcgggtttcgccacctctgacttgagcgtcgatttttgtgatgctcgtcaggggggcggagcctatggaaaaacgccagcaacgcggcctttttacggttcctggccttttgctggccttttgctcacatgttctttcctgcgttatcccctgattctgtggataaccgtattaccgcctttgagtgagctgataccgctcgccgcagccgaacgaccgagcgcagcgagtcagtgagcgaggaagcggaagagcgcccaatacgcaaaccgcctctccccgcgcgttggccgattcattaatgcagctggcacgacaggtttcccgactggaaagcgggcagtgagcgcaacgcaattaatgtgagttagctcactcattaggcaccccaggctttacactttatgcttccggctcgtatgttgtgtggaattgtgagcggataacaatttcacacaggaaacagctatgaccatgattacgccagatttaattaag

SEQ ID NO: 26 - DNA, 4850 bp, Artificial Sequence
  Description of Artificial Sequence: Synthetic polynucleotide
gccttaattaggctgcgcgctcgctcgctcactgaggccgcccgggcaaagcccgggcgtcgggcgacctttggtcgcccggcctcagtgagcgagcgagcgcgcagagagggagtggccaactccatcactaggggttccttgtagttaatgattaacccgccatgctacttatctaccagggtaatggggatcctctagaactatagctagtcgacattgattattgactagttattaatagtaatcaattacggggtcattagttcatagcccatatatggagttccgcgttacataacttacggtaaatggcccgcctggctgaccgcccaacgacccccgcccattgacgtcaataatgacgtatgttcccatagtaacgccaatagggactttccattgacgtcaatgggtggagtatttacggtaaactgcccacttggcagtacatcaagtgtatcatatgccaagtacgccccctattgacgtcaatgacggtaaatggcccgcctggcattatgcccagtacatgaccttatgggactttcctacttggcagtacatctacgtattagtcatcgctattaccatgtcgaggccacgttctgcttcactctccccatctcccccccctccccacccccaattttgtatttatttattttttaattattttgtgcagcgatgggggcggggggggggggcgcgcgccaggcggggcggggcggggcgaggggcggggcggggcgaggcggagaggtgcggcggcagccaatcagagcggcgcgctccgaaagtttccttttatggcgaggcggcggcggcggcggccctataaaaagcgaagcgcgcggcgggcgggagcaagcttgaactgaaaaaccagaaagttaactggtaagtttagtctttttgtcttttatttcaggtcccggatccggtggtggtgcaaatcaaagaactgctcctcagtggatgttgcctttacttctaggcctgtacggaagtgttacttctgctctaaaagctgcggaattgtacccgcggccgatccaccggtgccgccaccatggctttacttactgcggccgcccggctcttgggaaccaagaatgcatcttgtcttgttcttgcagcccggcatgctagtctgcgcaccgacatcgatgcgacctgcacgccccgccgcgcaagttcgaaccaacgtggcctcaaccagatttggaatgtcaaaaagcagagtgtctatttgatgaatttgaggaaatctggaactttgggccacccaggctctctagatgagaccacctatgaaagactagcagaggaaacgctggactctttagcagagttttttgaagaccttgcagacaagccatacacgtttgaggactatgatgtctcctttgggagtggtgtcttaactgtcaaactgggtggagatctaggaacctatgtgatcaacaagcagacgccaaacaagcaaatctggctatcttctccatccagtggacctaagcgttatgactggactgggaaaaactgggtgttctcccacgacggcgtgtccctccatgagctgctggccgcagagctcactaaagccttaaaaaccaaactggacttgtcttggttggcctattccggaaaagatgcttgactcgaggacggggtgaactacgcctgaggatccgatctttttccctctgccaaaaattatggggacatcatgaagccccttgagcatctgacttctggctaataaaggaaatttattttcattgcaatagtgtgttggaattttttgtgtctctcactcggaagcaattcgttgatctgaatttcgaccacccataatacccattaccctggtagataagtagcatggcgggttaatcattaactacaaggaacccctagtgatggagttggccactccctctctgcgcgctcgctcgctcactgaggccgggcgaccaaaggtcgcccgacgcccgggctttgcccgggcggcctcagtgagcgagcgagcgcgcagccttaattaacctaattcactggccgtcgttttacaacgtcgtgactgggaaaaccctggcgttacccaacttaatcgccttgcagcacatccccctttcgccagctggcgtaatagcgaagaggcccgcaccgatcgcccttcccaacagttgcgcagcctgaatggcgaatgggacgcgccctgtagcggcgcattaagcgcggcgggtgtggtggttacgcgcagcgtgaccgctacacttgccagcgccctagcgcccgctcctttcgctttcttcccttcctttctcgccacgttcgccggctttccccgtcaagctctaaatcgggggctccctttagggttccgatttagtgctttacggcacctcgaccccaaaaaacttgattagggtgatggttcacgtagtgggccatcgccctgatagacggtttttcgccctttgacgttggagtccacgttctttaatagtggactcttgttccaaactggaacaacactcaaccctatctcggtctattcttttgatttataagggattttgccgatttcggcctattggttaaaaaatgagctgatttaacaaaaatttaacgcgaattttaacaaaatattaacgcttacaatttaggtggcacttttcggggaaatgtgcgcggaacccctatttgtttatttttctaaatacattcaaatatgtatccgctcatgagacaataaccctgataaatgcttcaataatattgaaaaaggaagagtatgagtattcaacatttccgtgtcgcccttattcccttttttgcggcattttgccttcctgtttttgctcacccagaaacgctggtgaaagtaaaagatgctgaagatcagttgggtgcacgagtgggttacatcgaactggatctcaacagcggtaagatccttgagagttttcgccccgaagaacgttttccaatgatgagcacttttaaagttctgctatgtggcgcggtattatcccgtattgacgccgggcaagagcaactcggtcgccgcatacactattctcagaatgacttggttgagtactcaccagtcacagaaaagcatcttacggatggcatgacagtaagagaattatgcagtgctgccataaccatgagtgataacactgcggccaacttacttctgacaacgatcggaggaccgaaggagctaaccgcttttttgcacaacatgggggatcatgtaactcgccttgatcgttgggaaccggagctgaatgaagccataccaaacgacgagcgtgacaccacgatgcctgtagcaatggcaacaacgttgcgcaaactattaactggcgaactacttactctagcttcccggcaacaattaatagactggatggaggcggataaagttgcaggaccacttctgcgctcggcccttccggctggctggtttattgctgataaatctggagccggtgagcgtgggtctcgcggtatcattgcagcactggggccagatggtaagccctcccgtatcgtagttatctacacgacggggagtcaggcaactatggatgaacgaaatagacagatcgctgagataggtgcctcactgattaagcattggtaactgtcagaccaagtttactcatatatactttagattgatttaaaacttcatttttaatttaaaaggatctaggtgaagatcctttttgataatctcatgaccaaaatcccttaacgtgagttttcgttccactgagcgtcagaccccgtagaaaagatcaaaggatcttcttgagatcctttttttctgcgcgtaatctgctgcttgcaaacaaaaaaaccaccgctaccagcggtggtttgtttgccggatcaagagctaccaactctttttccgaaggtaactggcttcagcagagcgcagataccaaatactgttcttctagtgtagccgtagttaggccaccacttcaagaactctgtagcaccgcctacatacctcgctctgctaatcctgttaccagtggctgctgccagtggcgataagtcgtgtcttaccgggttggactcaagacgatagttaccggataaggcgcagcggtcgggctgaacggggggttcgtgcacacagcccagcttggagcgaacgacctacaccgaactgagatacctacagcgtgagctatgagaaagcgccacgcttcccgaagggagaaaggcggacaggtatccggtaagcggcagggtcggaacaggagagcgcacgagggagcttccagggggaaacgcctggtatctttatagtcctgtcgggtttcgccacctctgacttgagcgtcgatttttgtgatgctcgtcaggggggcggagcctatggaaaaacgccagcaacgcggcctttttacggttcctggccttttgctggccttttgctcacatgttctttcctgcgttatcccctgattctgtggataaccgtattaccgcctttgagtgagctgataccgctcgccgcagccgaacgaccgagcgcagcgagtcagtgagcgaggaagcggaagagcgcccaatacgcaaaccgcctctccccgcgcgttggccgattcattaatgcagctggcacgacaggtttcccgactggaaagcgggcagtgagcgcaacgcaattaatgtgagttagctcactcattaggcaccccaggctttacactttatgcttccggctcgtatgttgtgtggaattgtgagcggataacaatttcacacaggaaacagctatgaccatgattacgccagatttaattaag

SEQ ID NO: 27 - DNA, 4892 bp, Artificial Sequence
  Description of Artificial Sequence: Synthetic polynucleotide
gccttaattaggctgcgcgctcgctcgctcactgaggccgcccgggcaaagcccgggcgtcgggcgacctttggtcgcccggcctcagtgagcgagcgagcgcgcagagagggagtggccaactccatcactaggggttccttgtagttaatgattaacccgccatgctacttatctaccagggtaatggggatcctctagaactatagctagtcgacattgattattgactagttattaatagtaatcaattacggggtcattagttcatagcccatatatggagttccgcgttacataacttacggtaaatggcccgcctggctgaccgcccaacgacccccgcccattgacgtcaataatgacgtatgttcccatagtaacgccaatagggactttccattgacgtcaatgggtggagtatttacggtaaactgcccacttggcagtacatcaagtgtatcatatgccaagtacgccccctattgacgtcaatgacggtaaatggcccgcctggcattatgcccagtacatgaccttatgggactttcctacttggcagtacatctacgtattagtcatcgctattaccatgtcgaggccacgttctgcttcactctccccatctcccccccctccccacccccaattttgtatttatttattttttaattattttgtgcagcgatgggggcggggggggggggcgcgcgccaggcggggcggggcggggcgaggggcggggcggggcgaggcggagaggtgcggcggcagccaatcagagcggcgcgctccgaaagtttccttttatggcgaggcggcggcggcggcggccctataaaaagcgaagcgcgcggcgggcgggagcaagcttgaactgaaaaaccagaaagttaactggtaagtttagtctttttgtcttttatttcaggtcccggatccggtggtggtgcaaatcaaagaactgctcctcagtggatgttgcctttacttctaggcctgtacggaagtgttacttctgctctaaaagctgcggaattgtacccgcggccgatccaccggtgccgccaccatggctttacttactgcggccgcccggctcttgggaaccaagaatgcatcttgtcttgttcttgcagcccggcatgctagtctgcgcaccgacatcgatgcgacctgcacgccccgccgcgcaagttcgaaccaacgtggcctcaaccagatttggaatgtcaaaaagcagagtgtctatttgatgaatttgaggaaatctggaactttgggccacccaggctctctagatgagaccacctatgaaagactagcagaggaaacgctggactctttagcagagttttttgaagaccttgcagacaagccatacacgtttgaggactatgatgtctcctttgggagtggtgtcttaactgtcaaactgggtggagatctaggaacctatgtgatcaacaagcagacgccaaacaagcaaatctggctatcttctccatccagtggacctaagcgttatgactggactgggaaaaactgggtgttctcccacgacggcgtgtccctccatgagctgctggccgcagagctcactaaagccttaaaaaccaaactggacttgtcttggttggcctattccggaaaagatgcttatccttatgacgtgcctgactatgccagcctgggaggaccttgactcgaggacggggtgaactacgcctgaggatccgatctttttccctctgccaaaaattatggggacatcatgaagccccttgagcatctgacttctggctaataaaggaaatttattttcattgcaatagtgtgttggaattttttgtgtctctcactcggaagcaattcgttgatctgaatttcgaccacccataatacccattaccctggtagataagtagcatggcgggttaatcattaactacaaggaacccctagtgatggagttggccactccctctctgcgcgctcgctcgctcactgaggccgggcgaccaaaggtcgcccgacgcccgggctttgcccgggcggcctcagtgagcgagcgagcgcgcagccttaattaacctaattcactggccgtcgttttacaacgtcgtgactgggaaaaccctggcgttacccaacttaatcgccttgcagcacatccccctttcgccagctggcgtaatagcgaagaggcccgcaccgatcgcccttcccaacagttgcgcagcctgaatggcgaatgggacgcgccctgtagcggcgcattaagcgcggcgggtgtggtggttacgcgcagcgtgaccgctacacttgccagcgccctagcgcccgctcctttcgctttcttcccttcctttctcgccacgttcgccggctttccccgtcaagctctaaatcgggggctccctttagggttccgatttagtgctttacggcacctcgaccccaaaaaacttgattagggtgatggttcacgtagtgggccatcgccctgatagacggtttttcgccctttgacgttggagtccacgttctttaatagtggactcttgttccaaactggaacaacactcaaccctatctcggtctattcttttgatttataagggattttgccgatttcggcctattggttaaaaaatgagctgatttaacaaaaatttaacgcgaattttaacaaaatattaacgcttacaatttaggtggcacttttcggggaaatgtgcgcggaacccctatttgtttatttttctaaatacattcaaatatgtatccgctcatgagacaataaccctgataaatgcttcaataatattgaaaaaggaagagtatgagtattcaacatttccgtgtcgcccttattcccttttttgcggcattttgccttcctgtttttgctcacccagaaacgctggtgaaagtaaaagatgctgaagatcagttgggtgcacgagtgggttacatcgaactggatctcaacagcggtaagatccttgagagttttcgccccgaagaacgttttccaatgatgagcacttttaaagttctgctatgtggcgcggtattatcccgtattgacgccgggcaagagcaactcggtcgccgcatacactattctcagaatgacttggttgagtactcaccagtcacagaaaagcatcttacggatggcatgacagtaagagaattatgcagtgctgccataaccatgagtgataacactgcggccaacttacttctgacaacgatcggaggaccgaaggagctaaccgcttttttgcacaacatgggggatcatgtaactcgccttgatcgttgggaaccggagctgaatgaagccataccaaacgacgagcgtgacaccacgatgcctgtagcaatggcaacaacgttgcgcaaactattaactggcgaactacttactctagcttcccggcaacaattaatagactggatggaggcggataaagttgcaggaccacttctgcgctcggcccttccggctggctggtttattgctgataaatctggagccggtgagcgtgggtctcgcggtatcattgcagcactggggccagatggtaagccctcccgtatcgtagttatctacacgacggggagtcaggcaactatggatgaacgaaatagacagatcgctgagataggtgcctcactgattaagcattggtaactgtcagaccaagtttactcatatatactttagattgatttaaaacttcatttttaatttaaaaggatctaggtgaagatcctttttgataatctcatgaccaaaatcccttaacgtgagttttcgttccactgagcgtcagaccccgtagaaaagatcaaaggatcttcttgagatcctttttttctgcgcgtaatctgctgcttgcaaacaaaaaaaccaccgctaccagcggtggtttgtttgccggatcaagagctaccaactctttttccgaaggtaactggcttcagcagagcgcagataccaaatactgttcttctagtgtagccgtagttaggccaccacttcaagaactctgtagcaccgcctacatacctcgctctgctaatcctgttaccagtggctgctgccagtggcgataagtcgtgtcttaccgggttggactcaagacgatagttaccggataaggcgcagcggtcgggctgaacggggggttcgtgcacacagcccagcttggagcgaacgacctacaccgaactgagatacctacagcgtgagctatgagaaagcgccacgcttcccgaagggagaaaggcggacaggtatccggtaagcggcagggtcggaacaggagagcgcacgagggagcttccagggggaaacgcctggtatctttatagtcctgtcgggtttcgccacctctgacttgagcgtcgatttttgtgatgctcgtcaggggggcggagcctatggaaaaacgccagcaacgcggcctttttacggttcctggccttttgctggccttttgctcacatgttctttcctgcgttatcccctgattctgtggataaccgtattaccgcctttgagtgagctgataccgctcgccgcagccgaacgaccgagcgcagcgagtcagtgagcgaggaagcggaagagcgcccaatacgcaaaccgcctctccccgcgcgttggccgattcattaatgcagctggcacgacaggtttcccgactggaaagcgggcagtgagcgcaacgcaattaatgtgagttagctcactcattaggcaccccaggctttacactttatgcttccggctcgtatgttgtgtggaattgtgagcggataacaatttcacacaggaaacagctatgaccatgattacgccagatttaattaag

SEQ ID NO: 28 - DNA, 4877 bp, Artificial Sequence
  Description of Artificial Sequence: Synthetic polynucleotide
gccttaattaggctgcgcgctcgctcgctcactgaggccgcccgggcaaagcccgggcgtcgggcgacctttggtcgcccggcctcagtgagcgagcgagcgcgcagagagggagtggccaactccatcactaggggttccttgtagttaatgattaacccgccatgctacttatctaccagggtaatggggatcctctagaactatagctagtcgacattgattattgactagttattaatagtaatcaattacggggtcattagttcatagcccatatatggagttccgcgttacataacttacggtaaatggcccgcctggctgaccgcccaacgacccccgcccattgacgtcaataatgacgtatgttcccatagtaacgccaatagggactttccattgacgtcaatgggtggagtatttacggtaaactgcccacttggcagtacatcaagtgtatcatatgccaagtacgccccctattgacgtcaatgacggtaaatggcccgcctggcattatgcccagtacatgaccttatgggactttcctacttggcagtacatctacgtattagtcatcgctattaccatgtcgaggccacgttctgcttcactctccccatctcccccccctccccacccccaattttgtatttatttattttttaattattttgtgcagcgatgggggcggggggggggggcgcgcgccaggcggggcggggcggggcgaggggcggggcggggcgaggcggagaggtgcggcggcagccaatcagagcggcgcgctccgaaagtttccttttatggcgaggcggcggcggcggcggccctataaaaagcgaagcgcgcggcgggcgggagcaagcttgaactgaaaaaccagaaagttaactggtaagtttagtctttttgtcttttatttcaggtcccggatccggtggtggtgcaaatcaaagaactgctcctcagtggatgttgcctttacttctaggcctgtacggaagtgttacttctgctctaaaagctgcggaattgtacccgcggccgatccaccggtgccgccaccatggctttacttactgcggccgcccggctcttgggaaccaagaatgcatcttgtcttgttcttgcagcccggcatgctagtctgcgcaccgacatcgatgcgacctgcacgccccgccgcgcaagttcgaaccaacgtggcctcaaccagatttggaatgtcaaaaagcagagtgtctatttgatgaatttgaggaaatctggaactttgggccacccaggctctctagatgagaccacctatgaaagactagcagaggaaacgctggactctttagcagagttttttgaagaccttgcagacaagccatacacgtttgaggactatgatgtctcctttgggagtggtgtcttaactgtcaaactgggtggagatctaggaacctatgtgatcaacaagcagacgccaaacaagcaaatctggctatcttctccatccagtggacctaagcgttatgactggactgggaaaaactgggtgttctcccacgacggcgtgtccctccatgagctgctggccgcagagctcactaaagccttaaaaaccaaactggacttgtcttggttggcctattccggaaaagatgcttatccttatgacgtgcctgactatgcctgactcgaggacggggtgaactacgcctgaggatccgatctttttccctctgccaaaaattatggggacatcatgaagccccttgagcatctgacttctggctaataaaggaaatttattttcattgcaatagtgtgttggaattttttgtgtctctcactcggaagcaattcgttgatctgaatttcgaccacccataatacccattaccctggtagataagtagcatggcgggttaatcattaactacaaggaacccctagtgatggagttggccactccctctctgcgcgctcgctcgctcactgaggccgggcgaccaaaggtcgcccgacgcccgggctttgcccgggcggcctcagtgagcgagcgagcgcgcagccttaattaacctaattcactggccgtcgttttacaacgtcgtgactgggaaaaccctggcgttacccaacttaatcgccttgcagcacatccccctttcgccagctggcgtaatagcgaagaggcccgcaccgatcgcccttcccaacagttgcgcagcctgaatggcgaatgggacgcgccctgtagcggcgcattaagcgcggcgggtgtggtggttacgcgcagcgtgaccgctacacttgccagcgccctagcgcccgctcctttcgctttcttcccttcctttctcgccacgttcgccggctttccccgtcaagctctaaatcgggggctccctttagggttccgatttagtgctttacggcacctcgaccccaaaaaacttgattagggtgatggttcacgtagtgggccatcgccctgatagacggtttttcgccctttgacgttggagtccacgttctttaatagtggactcttgttccaaactggaacaacactcaaccctatctcggtctattcttttgatttataagggattttgccgatttcggcctattggttaaaaaatgagctgatttaacaaaaatttaacgcgaattttaacaaaatattaacgcttacaatttaggtggcacttttcggggaaatgtgcgcggaacccctatttgtttatttttctaaatacattcaaatatgtatccgctcatgagacaataaccctgataaatgcttcaataatattgaaaaaggaagagtatgagtattcaacatttccgtgtcgcccttattcccttttttgcggcattttgccttcctgtttttgctcacccagaaacgctggtgaaagtaaaagatgctgaagatcagttgggtgcacgagtgggttacatcgaactggatctcaacagcggtaagatccttgagagttttcgccccgaagaacgttttccaatgatgagcacttttaaagttctgctatgtggcgcggtattatcccgtattgacgccgggcaagagcaactcggtcgccgcatacactattctcagaatgacttggttgagtactcaccagtcacagaaaagcatcttacggatggcatgacagtaagagaattatgcagtgctgccataaccatgagtgataacactgcggccaacttacttctgacaacgatcggaggaccgaaggagctaaccgcttttttgcacaacatgggggatcatgtaactcgccttgatcgttgggaaccggagctgaatgaagccataccaaacgacgagcgtgacaccacgatgcctgtagcaatggcaacaacgttgcgcaaactattaactggcgaactacttactctagcttcccggcaacaattaatagactggatggaggcggataaagttgcaggaccacttctgcgctcggcccttccggctggctggtttattgctgataaatctggagccggtgagcgtgggtctcgcggtatcattgcagcactggggccagatggtaagccctcccgtatcgtagttatctacacgacggggagtcaggcaactatggatgaacgaaatagacagatcgctgagataggtgcctcactgattaagcattggtaactgtcagaccaagtttactcatatatactttagattgatttaaaacttcatttttaatttaaaaggatctaggtgaagatcctttttgataatctcatgaccaaaatcccttaacgtgagttttcgttccactgagcgtcagaccccgtagaaaagatcaaaggatcttcttgagatcctttttttctgcgcgtaatctgctgcttgcaaacaaaaaaaccaccgctaccagcggtggtttgtttgccggatcaagagctaccaactctttttccgaaggtaactggcttcagcagagcgcagataccaaatactgttcttctagtgtagccgtagttaggccaccacttcaagaactctgtagcaccgcctacatacctcgctctgctaatcctgttaccagtggctgctgccagtggcgataagtcgtgtcttaccgggttggactcaagacgatagttaccggataaggcgcagcggtcgggctgaacggggggttcgtgcacacagcccagcttggagcgaacgacctacaccgaactgagatacctacagcgtgagctatgagaaagcgccacgcttcccgaagggagaaaggcggacaggtatccggtaagcggcagggtcggaacaggagagcgcacgagggagcttccagggggaaacgcctggtatctttatagtcctgtcgggtttcgccacctctgacttgagcgtcgatttttgtgatgctcgtcaggggggcggagcctatggaaaaacgccagcaacgcggcctttttacggttcctggccttttgctggccttttgctcacatgttctttcctgcgttatcccctgattctgtggataaccgtattaccgcctttgagtgagctgataccgctcgccgcagccgaacgaccgagcgcagcgagtcagtgagcgaggaagcggaagagcgcccaatacgcaaaccgcctctccccgcgcgttggccgattcattaatgcagctggcacgacaggtttcccgactggaaagcgggcagtgagcgcaacgcaattaatgtgagttagctcactcattaggcaccccaggctttacactttatgcttccggctcgtatgttgtgtggaattgtgagcggataacaatttcacacaggaaacagctatgaccatgattacgccagatttaattaag

SEQ ID NO: 29 - DNA, 4892 bp, Artificial Sequence
  Description of Artificial Sequence: Synthetic polynucleotide
gccttaattaggctgcgcgctcgctcgctcactgaggccgcccgggcaaagcccgggcgtcgggcgacctttggtcgcccggcctcagtgagcgagcgagcgcgcagagagggagtggccaactccatcactaggggttccttgtagttaatgattaacccgccatgctacttatctaccagggtaatggggatcctctagaactatagctagtcgacattgattattgactagttattaatagtaatcaattacggggtcattagttcatagcccatatatggagttccgcgttacataacttacggtaaatggcccgcctggctgaccgcccaacgacccccgcccattgacgtcaataatgacgtatgttcccatagtaacgccaatagggactttccattgacgtcaatgggtggagtatttacggtaaactgcccacttggcagtacatcaagtgtatcatatgccaagtacgccccctattgacgtcaatgacggtaaatggcccgcctggcattatgcccagtacatgaccttatgggactttcctacttggcagtacatctacgtattagtcatcgctattaccatgtcgaggccacgttctgcttcactctccccatctcccccccctccccacccccaattttgtatttatttattttttaattattttgtgcagcgatgggggcggggggggggggcgcgcgccaggcggggcggggcggggcgaggggcggggcggggcgaggcggagaggtgcggcggcagccaatcagagcggcgcgctccgaaagtttccttttatggcgaggcggcggcggcggcggccctataaaaagcgaagcgcgcggcgggcgggagcaagcttgaactgaaaaaccagaaagttaactggtaagtttagtctttttgtcttttatttcaggtcccggatccggtggtggtgcaaatcaaagaactgctcctcagtggatgttgcctttacttctaggcctgtacggaagtgttacttctgctctaaaagctgcggaattgtacccgcggccgatccaccggtgccgccaccatgtggactctcgggcgccgcgcagtagccggcctcctggcgtcacccagcccggcccaggcccagaccctcacccgggtcccgcggccggcagagttggccccactctgcggccgccgtggcctgcgcaccgacatcgatgcgacctgcacgccccgccgcgcaagttcgaaccaacgtggcctcaaccagatttggaatgtcaaaaagcagagtgtctatttgatgaatttgaggaaatctggaactttgggccacccaggctctctagatgagaccacctatgaaagactagcagaggaaacgctggactctttagcagagttttttgaagaccttgcagacaagccatacacgtttgaggactatgatgtctcctttgggagtggtgtcttaactgtcaaactgggtggagatctaggaacctatgtgatcaacaagcagacgccaaacaagcaaatctggctatcttctccatccagtggacctaagcgttatgactggactgggaaaaactgggtgttctcccacgacggcgtgtccctccatgagctgctggccgcagagctcactaaagccttaaaaaccaaactggacttgtcttggttggcctattccggaaaagatgcttgactcgaggacggggtgaactacgcctgaggatccgatctttttccctctgccaaaaattatggggacatcatgaagccccttgagcatctgacttctggctaataaaggaaatttattttcattgcaatagtgtgttggaattttttgtgtctctcactcggaagcaattcgttgatctgaatttcgaccacccataatacccattaccctggtagataagtagcatggcgggttaatcattaactacaaggaacccctagtgatggagttggccactccctctctgcgcgctcgctcgctcactgaggccgggcgaccaaaggtcgcccgacgcccgggctttgcccgggcggcctcagtgagcgagcgagcgcgcagccttaattaacctaattcactggccgtcgttttacaacgtcgtgactgggaaaaccctggcgttacccaacttaatcgccttgcagcacatccccctttcgccagctggcgtaatagcgaagaggcccgcaccgatcgcccttcccaacagttgcgcagcctgaatggcgaatgggacgcgccctgtagcggcgcattaagcgcggcgggtgtggtggttacgcgcagcgtgaccgctacacttgccagcgccctagcgcccgctcctttcgctttcttcccttcctttctcgccacgttcgccggctttccccgtcaagctctaaatcgggggctccctttagggttccgatttagtgctttacggcacctcgaccccaaaaaacttgattagggtgatggttcacgtagtgggccatcgccctgatagacggtttttcgccctttgacgttggagtccacgttctttaatagtggactcttgttccaaactggaacaacactcaaccctatctcggtctattcttttgatttataagggattttgccgatttcggcctattggttaaaaaatgagctgatttaacaaaaatttaacgcgaattttaacaaaatattaacgcttacaatttaggtggcacttttcggggaaatgtgcgcggaacccctatttgtttatttttctaaatacattcaaatatgtatccgctcatgagacaataaccctgataaatgcttcaataatattgaaaaaggaagagtatgagtattcaacatttccgtgtcgcccttattcccttttttgcggcattttgccttcctgtttttgctcacccagaaacgctggtgaaagtaaaagatgctgaagatcagttgggtgcacgagtgggttacatcgaactggatctcaacagcggtaagatccttgagagttttcgccccgaagaacgttttccaatgatgagcacttttaaagttctgctatgtggcgcggtattatcccgtattgacgccgggcaagagcaactcggtcgccgcatacactattctcagaatgacttggttgagtactcaccagtcacagaaaagcatcttacggatggcatgacagtaagagaattatgcagtgctgccataaccatgagtgataacactgcggccaacttacttctgacaacgatcggaggaccgaaggagctaaccgcttttttgcacaacatgggggatcatgtaactcgccttgatcgttgggaaccggagctgaatgaagccataccaaacgacgagcgtgacaccacgatgcctgtagcaatggcaacaacgttgcgcaaactattaactggcgaactacttactctagcttcccggcaacaattaatagactggatggaggcggataaagttgcaggaccacttctgcgctcggcccttccggctggctggtttattgctgataaatctggagccggtgagcgtgggtctcgcggtatcattgcagcactggggccagatggtaagccctcccgtatcgtagttatctacacgacggggagtcaggcaactatggatgaacgaaatagacagatcgctgagataggtgcctcactgattaagcattggtaactgtcagaccaagtttactcatatatactttagattgatttaaaacttcatttttaatttaaaaggatctaggtgaagatcctttttgataatctcatgaccaaaatcccttaacgtgagttttcgttccactgagcgtcagaccccgtagaaaagatcaaaggatcttcttgagatcctttttttctgcgcgtaatctgctgcttgcaaacaaaaaaaccaccgctaccagcggtggtttgtttgccggatcaagagctaccaactctttttccgaaggtaactggcttcagcagagcgcagataccaaatactgttcttctagtgtagccgtagttaggccaccacttcaagaactctgtagcaccgcctacatacctcgctctgctaatcctgttaccagtggctgctgccagtggcgataagtcgtgtcttaccgggttggactcaagacgatagttaccggataaggcgcagcggtcgggctgaacggggggttcgtgcacacagcccagcttggagcgaacgacctacaccgaactgagatacctacagcgtgagctatgagaaagcgccacgcttcccgaagggagaaaggcggacaggtatccggtaagcggcagggtcggaacaggagagcgcacgagggagcttccagggggaaacgcctggtatctttatagtcctgtcgggtttcgccacctctgacttgagcgtcgatttttgtgatgctcgtcaggggggcggagcctatggaaaaacgccagcaacgcggcctttttacggttcctggccttttgctggccttttgctcacatgttctttcctgcgttatcccctgattctgtggataaccgtattaccgcctttgagtgagctgataccgctcgccgcagccgaacgaccgagcgcagcgagtcagtgagcgaggaagcggaagagcgcccaatacgcaaaccgcctctccccgcgcgttggccgattcattaatgcagctggcacgacaggtttcccgactggaaagcgggcagtgagcgcaacgcaattaatgtgagttagctcactcattaggcaccccaggctttacactttatgcttccggctcgtatgttgtgtggaattgtgagcggataacaatttcacacaggaaacagctatgaccatgattacgccagatttaattaag

SEQ ID NO: 30 - DNA, 4850 bp, Artificial Sequence
  Description of Artificial Sequence: Synthetic polynucleotide
gccttaattaggctgcgcgctcgctcgctcactgaggccgcccgggcaaagcccgggcgtcgggcgacctttggtcgcccggcctcagtgagcgagcgagcgcgcagagagggagtggccaactccatcactaggggttccttgtagttaatgattaacccgccatgctacttatctaccagggtaatggggatcctctagaactatagctagtcgacattgattattgactagttattaatagtaatcaattacggggtcattagttcatagcccatatatggagttccgcgttacataacttacggtaaatggcccgcctggctgaccgcccaacgacccccgcccattgacgtcaataatgacgtatgttcccatagtaacgccaatagggactttccattgacgtcaatgggtggagtatttacggtaaactgcccacttggcagtacatcaagtgtatcatatgccaagtacgccccctattgacgtcaatgacggtaaatggcccgcctggcattatgcccagtacatgaccttatgggactttcctacttggcagtacatctacgtattagtcatcgctattaccatgtcgaggccacgttctgcttcactctccccatctcccccccctccccacccccaattttgtatttatttattttttaattattttgtgcagcgatgggggcggggggggggggcgcgcgccaggcggggcggggcggggcgaggggcggggcggggcgaggcggagaggtgcggcggcagccaatcagagcggcgcgctccgaaagtttccttttatggcgaggcggcggcggcggcggccctataaaaagcgaagcgcgcggcgggcgggagcaagcttgaactgaaaaaccagaaagttaactggtaagtttagtctttttgtcttttatttcaggtcccggatccggtggtggtgcaaatcaaagaactgctcctcagtggatgttgcctttacttctaggcctgtacggaagtgttacttctgctctaaaagctgcggaattgtacccgcggccgatccaccggtgccgccaccatggctttacttactgcggccgcccggctcttgggaaccaagaatgcatcttgtcttgttcttgcagcccggcatgctagtctgcgaacagatatagacgcaacgtgcacccccagaagagcaagcagcaaccagagaggcctcaatcagatttggaacgtcaagaaacagagtgtctatctgatgaacctccgcaaatcagggacccttggtcatccgggatctcttgatgaaacgacctatgaacggctggctgaggagacgcttgactccctggcagagttcttcgaggatctggctgataagccatacacgttcgaggactatgatgtttcttttggttctggcgtcctgacggtgaaactcggaggggatctgggcacttacgttatcaacaaacagactcccaataaacagatttggttgtctagtcctagcagtggcccaaaacgctatgactggacgggcaagaactgggtgtactcccacgatggagttagcctgcacgaacttctggccgctgagcttactaaagcgctgaagactaagctggatctctccagcctcgcatacagcggcaaagacgcctagctcgaggacggggtgaactacgcctgaggatccgatctttttccctctgccaaaaattatggggacatcatgaagccccttgagcatctgacttctggctaataaaggaaatttattttcattgcaatagtgtgttggaattttttgtgtctctcactcggaagcaattcgttgatctgaatttcgaccacccataatacccattaccctggtagataagtagcatggcgggttaatcattaactacaaggaacccctagtgatggagttggccactccctctctgcgcgctcgctcgctcactgaggccgggcgaccaaaggtcgcccgacgcccgggctttgcccgggcggcctcagtgagcgagcgagcgcgcagccttaattaacctaattcactggccgtcgttttacaacgtcgtgactgggaaaaccctggcgttacccaacttaatcgccttgcagcacatccccctttcgccagctggcgtaatagcgaagaggcccgcaccgatcgcccttcccaacagttgcgcagcctgaatggcgaatgggacgcgccctgtagcggcgcattaagcgcggcgggtgtggtggttacgcgcagcgtgaccgctacacttgccagcgccctagcgcccgctcctttcgctttcttcccttcctttctcgccacgttcgccggctttccccgtcaagctctaaatcgggggctccctttagggttccgatttagtgctttacggcacctcgaccccaaaaaacttgattagggtgatggttcacgtagtgggccatcgccctgatagacggtttttcgccctttgacgttggagtccacgttctttaatagtggactcttgttccaaactggaacaacactcaaccctatctcggtctattcttttgatttataagggattttgccgatttcggcctattggttaaaaaatgagctgatttaacaaaaatttaacgcgaattttaacaaaatattaacgcttacaatttaggtggcacttttcggggaaatgtgcgcggaacccctatttgtttatttttctaaatacattcaaatatgtatccgctcatgagacaataaccctgataaatgcttcaataatattgaaaaaggaagagtatgagtattcaacatttccgtgtcgcccttattcccttttttgcggcattttgccttcctgtttttgctcacccagaaacgctggtgaaagtaaaagatgctgaagatcagttgggtgcacgagtgggttacatcgaactggatctcaacagcggtaagatccttgagagttttcgccccgaagaacgttttccaatgatgagcacttttaaagttctgctatgtggcgcggtattatcccgtattgacgccgggcaagagcaactcggtcgccgcatacactattctcagaatgacttggttgagtactcaccagtcacagaaaagcatcttacggatggcatgacagtaagagaattatgcagtgctgccataaccatgagtgataacactgcggccaacttacttctgacaacgatcggaggaccgaaggagctaaccgcttttttgcacaacatgggggatcatgtaactcgccttgatcgttgggaaccggagctgaatgaagccataccaaacgacgagcgtgacaccacgatgcctgtagcaatggcaacaacgttgcgcaaactattaactggcgaactacttactctagcttcccggcaacaattaatagactggatggaggcggataaagttgcaggaccacttctgcgctcggcccttccggctggctggtttattgctgataaatctggagccggtgagcgtgggtctcgcggtatcattgcagcactggggccagatggtaagccctcccgtatcgtagttatctacacgacggggagtcaggcaactatggatgaacgaaatagacagatcgctgagataggtgcctcactgattaagcattggtaactgtcagaccaagtttactcatatatactttagattgatttaaaacttcatttttaatttaaaaggatctaggtgaagatcctttttgataatctcatgaccaaaatcccttaacgtgagttttcgttccactgagcgtcagaccccgtagaaaagatcaaaggatcttcttgagatcctttttttctgcgcgtaatctgctgcttgcaaacaaaaaaaccaccgctaccagcggtggtttgtttgccggatcaagagctaccaactctttttccgaaggtaactggcttcagcagagcgcagataccaaatactgttcttctagtgtagccgtagttaggccaccacttcaagaactctgtagcaccgcctacatacctcgctctgctaatcctgttaccagtggctgctgccagtggcgataagtcgtgtcttaccgggttggactcaagacgatagttaccggataaggcgcagcggtcgggctgaacggggggttcgtgcacacagcccagcttggagcgaacgacctacaccgaactgagatacctacagcgtgagctatgagaaagcgccacgcttcccgaagggagaaaggcggacaggtatccggtaagcggcagggtcggaacaggagagcgcacgagggagcttccagggggaaacgcctggtatctttatagtcctgtcgggtttcgccacctctgacttgagcgtcgatttttgtgatgctcgtcaggggggcggagcctatggaaaaacgccagcaacgcggcctttttacggttcctggccttttgctggccttttgctcacatgttctttcctgcgttatcccctgattctgtggataaccgtattaccgcctttgagtgagctgataccgctcgccgcagccgaacgaccgagcgcagcgagtcagtgagcgaggaagcggaagagcgcccaatacgcaaaccgcctctccccgcgcgttggccgattcattaatgcagctggcacgacaggtttcccgactggaaagcgggcagtgagcgcaacgcaattaatgtgagttagctcactcattaggcaccccaggctttacactttatgcttccggctcgtatgttgtgtggaattgtgagcggataacaatttcacacaggaaacagctatgaccatgattacgccagatttaattaag

SEQ ID NO: 31 - DNA, 4892 bp, Artificial Sequence
  Description of Artificial Sequence: Synthetic polynucleotide
gccttaattaggctgcgcgctcgctcgctcactgaggccgcccgggcaaagcccgggcgtcgggcgacctttggtcgcccggcctcagtgagcgagcgagcgcgcagagagggagtggccaactccatcactaggggttccttgtagttaatgattaacccgccatgctacttatctaccagggtaatggggatcctctagaactatagctagtcgacattgattattgactagttattaatagtaatcaattacggggtcattagttcatagcccatatatggagttccgcgttacataacttacggtaaatggcccgcctggctgaccgcccaacgacccccgcccattgacgtcaataatgacgtatgttcccatagtaacgccaatagggactttccattgacgtcaatgggtggagtatttacggtaaactgcccacttggcagtacatcaagtgtatcatatgccaagtacgccccctattgacgtcaatgacggtaaatggcccgcctggcattatgcccagtacatgaccttatgggactttcctacttggcagtacatctacgtattagtcatcgctattaccatgtcgaggccacgttctgcttcactctccccatctcccccccctccccacccccaattttgtatttatttattttttaattattttgtgcagcgatgggggcggggggggggggcgcgcgccaggcggggcggggcggggcgaggggcggggcggggcgaggcggagaggtgcggcggcagccaatcagagcggcgcgctccgaaagtttccttttatggcgaggcggcggcggcggcggccctataaaaagcgaagcgcgcggcgggcgggagcaagcttgaactgaaaaaccagaaagttaactggtaagtttagtctttttgtcttttatttcaggtcccggatccggtggtggtgcaaatcaaagaactgctcctcagtggatgttgcctttacttctaggcctgtacggaagtgttacttctgctctaaaagctgcggaattgtacccgcggccgatccaccggtgccgccaccatgtggactctcgggcgacgcgccgtagccggtctcctggcttccccaagccctgcacaggcacagaccctcacacgggtcccacggccagctgaattggccccactctgcggtcgccggggcctgcgaaccgatatagacgcaacgtgcactccccgacgagcaagttccaaccagagagggctcaaccagatttggaacgtcaagaagcagagtgtctatttgatgaatctgagaaaatccgggacccttgggcaccccggatctcttgatgaaactacctatgaaaggctggccgaggagacgctggactctctggcagagttcttcgaggatctggcagacaagccatacacgtttgaggactatgatgtctcttttggatctggcgtcctgacggttaaactgggaggggatctcggaacctacgttatcaacaaacagactcccaataagcagatctggttgtctagtccatccagtggtcctaaacgctatgactggacgggcaagaactgggtgtactcccacgacggagttagccttcatgaactgctggccgcagagctgactaaagctcttaagactaaactggatctctctagcctggcctactccgggaaagatgcctagctcgaggacggggtgaactacgcctgaggatccgatctttttccctctgccaaaaattatggggacatcatgaagccccttgagcatctgacttctggctaataaaggaaatttattttcattgcaatagtgtgttggaattttttgtgtctctcactcggaagcaattcgttgatctgaatttcgaccacccataatacccattaccctggtagataagtagcatggcgggttaatcattaactacaaggaacccctagtgatggagttggccactccctctctgcgcgctcgctcgctcactgaggccgggcgaccaaaggtcgcccgacgcccgggctttgcccgggcggcctcagtgagcgagcgagcgcgcagccttaattaacctaattcactggccgtcgttttacaacgtcgtgactgggaaaaccctggcgttacccaacttaatcgccttgcagcacatccccctttcgccagctggcgtaatagcgaagaggcccgcaccgatcgcccttcccaacagttgcgcagcctgaatggcgaatgggacgcgccctgtagcggcgcattaagcgcggcgggtgtggtggttacgcgcagcgtgaccgctacacttgccagcgccctagcgcccgctcctttcgctttcttcccttcctttctcgccacgttcgccggctttccccgtcaagctctaaatcgggggctccctttagggttccgatttagtgctttacggcacctcgaccccaaaaaacttgattagggtgatggttcacgtagtgggccatcgccctgatagacggtttttcgccctttgacgttggagtccacgttctttaatagtggactcttgttccaaactggaacaacactcaaccctatctcggtctattcttttgatttataagggattttgccgatttcggcctattggttaaaaaatgagctgatttaacaaaaatttaacgcgaattttaacaaaatattaacgcttacaatttaggtggcacttttcggggaaatgtgcgcggaacccctatttgtttatttttctaaatacattcaaatatgtatccgctcatgagacaataaccctgataaatgcttcaataatattgaaaaaggaagagtatgagtattcaacatttccgtgtcgcccttattcccttttttgcggcattttgccttcctgtttttgctcacccagaaacgctggtgaaagtaaaagatgctgaagatcagttgggtgcacgagtgggttacatcgaactggatctcaacagcggtaagatccttgagagttttcgccccgaagaacgttttccaatgatgagcacttttaaagttctgctatgtggcgcggtattatcccgtattgacgccgggcaagagcaactcggtcgccgcatacactattctcagaatgacttggttgagtactcaccagtcacagaaaagcatcttacggatggcatgacagtaagagaattatgcagtgctgccataaccatgagtgataacactgcggccaacttacttctgacaacgatcggaggaccgaaggagctaaccgcttttttgcacaacatgggggatcatgtaactcgccttgatcgttgggaaccggagctgaatgaagccataccaaacgacgagcgtgacaccacgatgcctgtagcaatggcaacaacgttgcgcaaactattaactggcgaactacttactctagcttcccggcaacaattaatagactggatggaggcggataaagttgcaggaccacttctgcgctcggcccttccggctggctggtttattgctgataaatctggagccggtgagcgtgggtctcgcggtatcattgcagcactggggccagatggtaagccctcccgtatcgtagttatctacacgacggggagtcaggcaactatggatgaacgaaatagacagatcgctgagataggtgcctcactgattaagcattggtaactgtcagaccaagtttactcatatatactttagattgatttaaaacttcatttttaatttaaaaggatctaggtgaagatcctttttgataatctcatgaccaaaatcccttaacgtgagttttcgttccactgagcgtcagaccccgtagaaaagatcaaaggatcttcttgagatcctttttttctgcgcgtaatctgctgcttgcaaacaaaaaaaccaccgctaccagcggtggtttgtttgccggatcaagagctaccaactctttttccgaaggtaactggcttcagcagagcgcagataccaaatactgttcttctagtgtagccgtagttaggccaccacttcaagaactctgtagcaccgcctacatacctcgctctgctaatcctgttaccagtggctgctgccagtggcgataagtcgtgtcttaccgggttggactcaagacgatagttaccggataaggcgcagcggtcgggctgaacggggggttcgtgcacacagcccagcttggagcgaacgacctacaccgaactgagatacctacagcgtgagctatgagaaagcgccacgcttcccgaagggagaaaggcggacaggtatccggtaagcggcagggtcggaacaggagagcgcacgagggagcttccagggggaaacgcctggtatctttatagtcctgtcgggtttcgccacctctgacttgagcgtcgatttttgtgatgctcgtcaggggggcggagcctatggaaaaacgccagcaacgcggcctttttacggttcctggccttttgctggccttttgctcacatgttctttcctgcgttatcccctgattctgtggataaccgtattaccgcctttgagtgagctgataccgctcgccgcagccgaacgaccgagcgcagcgagtcagtgagcgaggaagcggaagagcgcccaatacgcaaaccgcctctccccgcgcgttggccgattcattaatgcagctggcacgacaggtttcccgactggaaagcgggcagtgagcgcaacgcaattaatgtgagttagctcactcattaggcaccccaggctttacactttatgcttccggctcgtatgttgtgtggaattgtgagcggataacaatttcacacaggaaacagctatgaccatgattacgccagatttaattaag

SEQ ID NO: 32 - DNA, 4892 bp, Artificial Sequence
  Description of Artificial Sequence: Synthetic polynucleotide
gccttaattaggctgcgcgctcgctcgctcactgaggccgcccgggcaaagcccgggcgtcgggcgacctttggtcgcccggcctcagtgagcgagcgagcgcgcagagagggagtggccaactccatcactaggggttccttgtagttaatgattaacccgccatgctacttatctaccagggtaatggggatcctctagaactatagctagtcgacattgattattgactagttattaatagtaatcaattacggggtcattagttcatagcccatatatggagttccgcgttacataacttacggtaaatggcccgcctggctgaccgcccaacgacccccgcccattgacgtcaataatgacgtatgttcccatagtaacgccaatagggactttccattgacgtcaatgggtggagtatttacggtaaactgcccacttggcagtacatcaagtgtatcatatgccaagtacgccccctattgacgtcaatgacggtaaatggcccgcctggcattatgcccagtacatgaccttatgggactttcctacttggcagtacatctacgtattagtcatcgctattaccatgtcgaggccacgttctgcttcactctccccatctcccccccctccccacccccaattttgtatttatttattttttaattattttgtgcagcgatgggggcggggggggggggcgcgcgccaggcggggcggggcggggcgaggggcggggcggggcgaggcggagaggtgcggcggcagccaatcagagcggcgcgctccgaaagtttccttttatggcgaggcggcggcggcggcggccctataaaaagcgaagcgcgcggcgggcgggagcaagcttgaactgaaaaaccagaaagttaactggtaagtttagtctttttgtcttttatttcaggtcccggatccggtggtggtgcaaatcaaagaactgctcctcagtggatgttgcctttacttctaggcctgtacggaagtgttacttctgctctaaaagctgcggaattgtacccgcggccgatccaccggtgccgccaccatgtggactctggggcgacgcgccgtggccgggctcctggcatccccatcccctgcgcaggcgcaaaccctcacacgggttccacggccagctgaactggccccactgtgcggccggcggggcctgagaacagatattgacgcaacgtgcactcccagaagagccagcagcaaccagagggggttgaatcagatctggaacgtcaagaagcagtcagtgtacctgatgaatctccgaaaaagcgggacccttggtcaccccggatctctcgatgaaaccacatatgaacggctggccgaggaaacgctggactccctggccgagttcttcgaggacctggcagacaagccgtacaccttcgaagactatgatgtttcattcggaagtggcgtgctgacggtcaaactgggaggcgatctgggaacctacgttataaacaaacagactcccaataaacagatctggttgtctagtccatccagcggtcctaaacgctatgactggacgggcaagaactgggtctactcccacgacggagttagccttcacgaactgttggccgcagagctgacaaaggcgcttaagacgaaactggatctctctagcctggcctactccggcaaagatgcctagctcgaggacggggtgaactacgcctgaggatccgatctttttccctctgccaaaaattatggggacatcatgaagccccttgagcatctgacttctggctaataaaggaaatttattttcattgcaatagtgtgttggaattttttgtgtctctcactcggaagcaattcgttgatctgaatttcgaccacccataatacccattaccctggtagataagtagcatggcgggttaatcattaactacaaggaacccctagtgatggagttggccactccctctctgcgcgctcgctcgctcactgaggccgggcgaccaaaggtcgcccgacgcccgggctttgcccgggcggcctcagtgagcgagcgagcgcgcagccttaattaacctaattcactggccgtcgttttacaacgtcgtgactgggaaaaccctggcgttacccaacttaatcgccttgcagcacatccccctttcgccagctggcgtaatagcgaagaggcccgcaccgatcgcccttcccaacagttgcgcagcctgaatggcgaatgggacgcgccctgtagcggcgcattaagcgcggcgggtgtggtggttacgcgcagcgtgaccgctacacttgccagcgccctagcgcccgctcctttcgctttcttcccttcctttctcgccacgttcgccggctttccccgtcaagctctaaatcgggggctccctttagggttccgatttagtgctttacggcacctcgaccccaaaaaacttgattagggtgatggttcacgtagtgggccatcgccctgatagacggtttttcgccctttgacgttggagtccacgttctttaatagtggactcttgttccaaactggaacaacactcaaccctatctcggtctattcttttgatttataagggattttgccgatttcggcctattggttaaaaaatgagctgatttaacaaaaatttaacgcgaattttaacaaaatattaacgcttacaatttaggtggcacttttcggggaaatgtgcgcggaacccctatttgtttatttttctaaatacattcaaatatgtatccgctcatgagacaataaccctgataaatgcttcaataatattgaaaaaggaagagtatgagtattcaacatttccgtgtcgcccttattcccttttttgcggcattttgccttcctgtttttgctcacccagaaacgctggtgaaagtaaaagatgctgaagatcagttgggtgcacgagtgggttacatcgaactggatctcaacagcggtaagatccttgagagttttcgccccgaagaacgttttccaatgatgagcacttttaaagttctgctatgtggcgcggtattatcccgtattgacgccgggcaagagcaactcggtcgccgcatacactattctcagaatgacttggttgagtactcaccagtcacagaaaagcatcttacggatggcatgacagtaagagaattatgcagtgctgccataaccatgagtgataacactgcggccaacttacttctgacaacgatcggaggaccgaaggagctaaccgcttttttgcacaacatgggggatcatgtaactcgccttgatcgttgggaaccggagctgaatgaagccataccaaacgacgagcgtgacaccacgatgcctgtagcaatggcaacaacgttgcgcaaactattaactggcgaactacttactctagcttcccggcaacaattaatagactggatggaggcggataaagttgcaggaccacttctgcgctcggcccttccggctggctggtttattgctgataaatctggagccggtgagcgtgggtctcgcggtatcattgcagcactggggccagatggtaagccctcccgtatcgtagttatctacacgacggggagtcaggcaactatggatgaacgaaatagacagatcgctgagataggtgcctcactgattaagcattggtaactgtcagaccaagtttactcatatatactttagattgatttaaaacttcatttttaatttaaaaggatctaggtgaagatcctttttgataatctcatgaccaaaatcccttaacgtgagttttcgttccactgagcgtcagaccccgtagaaaagatcaaaggatcttcttgagatcctttttttctgcgcgtaatctgctgcttgcaaacaaaaaaaccaccgctaccagcggtggtttgtttgccggatcaagagctaccaactctttttccgaaggtaactggcttcagcagagcgcagataccaaatactgttcttctagtgtagccgtagttaggccaccacttcaagaactctgtagcaccgcctacatacctcgctctgctaatcctgttaccagtggctgctgccagtggcgataagtcgtgtcttaccgggttggactcaagacgatagttaccggataaggcgcagcggtcgggctgaacggggggttcgtgcacacagcccagcttggagcgaacgacctacaccgaactgagatacctacagcgtgagctatgagaaagcgccacgcttcccgaagggagaaaggcggacaggtatccggtaagcggcagggtcggaacaggagagcgcacgagggagcttccagggggaaacgcctggtatctttatagtcctgtcgggtttcgccacctctgacttgagcgtcgatttttgtgatgctcgtcaggggggcggagcctatggaaaaacgccagcaacgcggcctttttacggttcctggccttttgctggccttttgctcacatgttctttcctgcgttatcccctgattctgtggataaccgtattaccgcctttgagtgagctgataccgctcgccgcagccgaacgaccgagcgcagcgagtcagtgagcgaggaagcggaagagcgcccaatacgcaaaccgcctctccccgcgcgttggccgattcattaatgcagctggcacgacaggtttcccgactggaaagcgggcagtgagcgcaacgcaattaatgtgagttagctcactcattaggcaccccaggctttacactttatgcttccggctcgtatgttgtgtggaattgtgagcggataacaatttcacacaggaaacagctatgaccatgattacgccagatttaattaag

SEQ ID NO: 33 - DNA, 4892 bp, Artificial Sequence
  Description of Artificial Sequence: Synthetic polynucleotide
gccttaattaggctgcgcgctcgctcgctcactgaggccgcccgggcaaagcccgggcgtcgggcgacctttggtcgcccggcctcagtgagcgagcgagcgcgcagagagggagtggccaactccatcactaggggttccttgtagttaatgattaacccgccatgctacttatctaccagggtaatggggatcctctagaactatagctagtcgacattgattattgactagttattaatagtaatcaattacggggtcattagttcatagcccatatatggagttccgcgttacataacttacggtaaatggcccgcctggctgaccgcccaacgacccccgcccattgacgtcaataatgacgtatgttcccatagtaacgccaatagggactttccattgacgtcaatgggtggagtatttacggtaaactgcccacttggcagtacatcaagtgtatcatatgccaagtacgccccctattgacgtcaatgacggtaaatggcccgcctggcattatgcccagtacatgaccttatgggactttcctacttggcagtacatctacgtattagtcatcgctattaccatgtcgaggccacgttctgcttcactctccccatctcccccccctccccacccccaattttgtatttatttattttttaattattttgtgcagcgatgggggcggggggggggggcgcgcgccaggcggggcggggcggggcgaggggcggggcggggcgaggcggagaggtgcggcggcagccaatcagagcggcgcgctccgaaagtttccttttatggcgaggcggcggcggcggcggccctataaaaagcgaagcgcgcggcgggcgggagcaagcttgaactgaaaaaccagaaagttaactggtaagtttagtctttttgtcttttatttcaggtcccggatccggtggtggtgcaaatcaaagaactgctcctcagtggatgttgcctttacttctaggcctgtacggaagtgttacttctgctctaaaagctgcggaattgtacccgcggccgatccaccggtgccgccaccatgtggacactggggaggagggccgtcgctgggctgctggcttcaccatcacccgctcaggctcagaccctgacaagagtgccaaggccagcagagctggccccactgtgcgggcggagaggactgcgaaccgacatcgatgctacttgtaccccaaggcgagcaagctccaaccagcgagggctgaaccagatttggaatgtgaagaaacagtctgtctacctgatgaatctgagaaagagcggcactctgggacaccctggcagcctggacgagaccacctacgagcggctggccgaggaaaccctggattccctggccgagttctttgaagacctggctgataagccatacaccttcgaagactatgacgtgagcttcggcagcggcgtgctgacagtcaaactgggcggggacctgggaacatacgtgatcaacaagcagactcctaacaagcagatttggctgtctagtccctcaagcggccctaagaggtatgactggacagggaaaaactgggtgtatagtcacgatggcgtctcactgcatgagctgctggccgctgaactgactaaggcactgaaaactaaactggacctgagctccctggcttactctgggaaagacgcataactcgaggacggggtgaactacgcctgaggatccgatctttttccctctgccaaaaattatggggacatcatgaagccccttgagcatctgacttctggctaataaaggaaatttattttcattgcaatagtgtgttggaattttttgtgtctctcactcggaagcaattcgttgatctgaatttcgaccacccataatacccattaccctggtagataagtagcatggcgggttaatcattaactacaaggaacccctagtgatggagttggccactccctctctgcgcgctcgctcgctcactgaggccgggcgaccaaaggtcgcccgacgcccgggctttgcccgggcggcctcagtgagcgagcgagcgcgcagccttaattaacctaattcactggccgtcgttttacaacgtcgtgactgggaaaaccctggcgttacccaacttaatcgccttgcagcacatccccctttcgccagctggcgtaatagcgaagaggcccgcaccgatcgcccttcccaacagttgcgcagcctgaatggcgaatgggacgcgccctgtagcggcgcattaagcgcggcgggtgtggtggttacgcgcagcgtgaccgctacacttgccagcgccctagcgcccgctcctttcgctttcttcccttcctttctcgccacgttcgccggctttccccgtcaagctctaaatcgggggctccctttagggttccgatttagtgctttacggcacctcgaccccaaaaaacttgattagggtgatggttcacgtagtgggccatcgccctgatagacggtttttcgccctttgacgttggagtccacgttctttaatagtggactcttgttccaaactggaacaacactcaaccctatctcggtctattcttttgatttataagggattttgccgatttcggcctattggttaaaaaatgagctgatttaacaaaaatttaacgcgaattttaacaaaatattaacgcttacaatttaggtggcacttttcggggaaatgtgcgcggaacccctatttgtttatttttctaaatacattcaaatatgtatccgctcatgagacaataaccctgataaatgcttcaataatattgaaaaaggaagagtatgagtattcaacatttccgtgtcgcccttattcccttttttgcggcattttgccttcctgtttttgctcacccagaaacgctggtgaaagtaaaagatgctgaagatcagttgggtgcacgagtgggttacatcgaactggatctcaacagcggtaagatccttgagagttttcgccccgaagaacgttttccaatgatgagcacttttaaagttctgctatgtggcgcggtattatcccgtattgacgccgggcaagagcaactcggtcgccgcatacactattctcagaatgacttggttgagtactcaccagtcacagaaaagcatcttacggatggcatgacagtaagagaattatgcagtgctgccataaccatgagtgataacactgcggccaacttacttctgacaacgatcggaggaccgaaggagctaaccgcttttttgcacaacatgggggatcatgtaactcgccttgatcgttgggaaccggagctgaatgaagccataccaaacgacgagcgtgacaccacgatgcctgtagcaatggcaacaacgttgcgcaaactattaactggcgaactacttactctagcttcccggcaacaattaatagactggatggaggcggataaagttgcaggaccacttctgcgctcggcccttccggctggctggtttattgctgataaatctggagccggtgagcgtgggtctcgcggtatcattgcagcactggggccagatggtaagccctcccgtatcgtagttatctacacgacggggagtcaggcaactatggatgaacgaaatagacagatcgctgagataggtgcctcactgattaagcattggtaactgtcagaccaagtttactcatatatactttagattgatttaaaacttcatttttaatttaaaaggatctaggtgaagatcctttttgataatctcatgaccaaaatcccttaacgtgagttttcgttccactgagcgtcagaccccgtagaaaagatcaaaggatcttcttgagatcctttttttctgcgcgtaatctgctgcttgcaaacaaaaaaaccaccgctaccagcggtggtttgtttgccggatcaagagctaccaactctttttccgaaggtaactggcttcagcagagcgcagataccaaatactgttcttctagtgtagccgtagttaggccaccacttcaagaactctgtagcaccgcctacatacctcgctctgctaatcctgttaccagtggctgctgccagtggcgataagtcgtgtcttaccgggttggactcaagacgatagttaccggataaggcgcagcggtcgggctgaacggggggttcgtgcacacagcccagcttggagcgaacgacctacaccgaactgagatacctacagcgtgagctatgagaaagcgccacgcttcccgaagggagaaaggcggacaggtatccggtaagcggcagggtcggaacaggagagcgcacgagggagcttccagggggaaacgcctggtatctttatagtcctgtcgggtttcgccacctctgacttgagcgtcgatttttgtgatgctcgtcaggggggcggagcctatggaaaaacgccagcaacgcggcctttttacggttcctggccttttgctggccttttgctcacatgttctttcctgcgttatcccctgattctgtggataaccgtattaccgcctttgagtgagctgataccgctcgccgcagccgaacgaccgagcgcagcgagtcagtgagcgaggaagcggaagagcgcccaatacgcaaaccgcctctccccgcgcgttggccgattcattaatgcagctggcacgacaggtttcccgactggaaagcgggcagtgagcgcaacgcaattaatgtgagttagctcactcattaggcaccccaggctttacactttatgcttccggctcgtatgttgtgtggaattgtgagcggataacaatttcacacaggaaacagctatgaccatgattacgccagatttaattaag

SEQ ID NO: 34 - DNA, 4892 bp, Artificial Sequence
  Description of Artificial Sequence: Synthetic polynucleotide
gccttaattaggctgcgcgctcgctcgctcactgaggccgcccgggcaaagcccgggcgtcgggcgacctttggtcgcccggcctcagtgagcgagcgagcgcgcagagagggagtggccaactccatcactaggggttccttgtagttaatgattaacccgccatgctacttatctaccagggtaatggggatcctctagaactatagctagtcgacattgattattgactagttattaatagtaatcaattacggggtcattagttcatagcccatatatggagttccgcgttacataacttacggtaaatggcccgcctggctgaccgcccaacgacccccgcccattgacgtcaataatgacgtatgttcccatagtaacgccaatagggactttccattgacgtcaatgggtggagtatttacggtaaactgcccacttggcagtacatcaagtgtatcatatgccaagtacgccccctattgacgtcaatgacggtaaatggcccgcctggcattatgcccagtacatgaccttatgggactttcctacttggcagtacatctacgtattagtcatcgctattaccatgtcgaggccacgttctgcttcactctccccatctcccccccctccccacccccaattttgtatttatttattttttaattattttgtgcagcgatgggggcggggggggggggcgcgcgccaggcggggcggggcggggcgaggggcggggcggggcgaggcggagaggtgcggcggcagccaatcagagcggcgcgctccgaaagtttccttttatggcgaggcggcggcggcggcggccctataaaaagcgaagcgcgcggcgggcgggagcaagcttgaactgaaaaaccagaaagttaactggtaagtttagtctttttgtcttttatttcaggtcccggatccggtggtggtgcaaatcaaagaactgctcctcagtggatgttgcctttacttctaggcctgtacggaagtgttacttctgctctaaaagctgcggaattgtacccgcggccgatccaccggtgccgccaccatgtggacactgggcagaagggccgtggctgggctgctggcatctccctcccccgctcaggctcagacactgacccgcgtccctcggccagcagagctggccccactgtgcgggcggagaggactgcgaaccgacatcgatgctacttgtaccccaaggcgagcaagctccaaccagcgagggctgaaccagatttggaatgtgaagaaacagtctgtctacctgatgaatctgagaaagagcggcactctgggacaccctggcagcctggacgagaccacctacgagcggctggccgaggaaaccctggattccctggccgagttctttgaagacctggctgataagccatacaccttcgaagactatgacgtgagcttcggcagcggcgtgctgacagtcaaactgggcggggacctgggaacatacgtgatcaacaagcagactcctaacaagcagatttggctgtctagtccctcaagcggccctaagaggtacgactggacagggaaaaactgggtgtatagtcacgatggcgtctcactgcatgagctgctggccgctgaactgactaaagccctgaaaactaaactggacctgtcatccctggcatactctggcaaggacgcataactcgaggacggggtgaactacgcctgaggatccgatctttttccctctgccaaaaattatggggacatcatgaagccccttgagcatctgacttctggctaataaaggaaatttattttcattgcaatagtgtgttggaattttttgtgtctctcactcggaagcaattcgttgatctgaatttcgaccacccataatacccattaccctggtagataagtagcatggcgggttaatcattaactacaaggaacccctagtgatggagttggccactccctctctgcgcgctcgctcgctcactgaggccgggcgaccaaaggtcgcccgacgcccgggctttgcccgggcggcctcagtgagcgagcgagcgcgcagccttaattaacctaattcactggccgtcgttttacaacgtcgtgactgggaaaaccctggcgttacccaacttaatcgccttgcagcacatccccctttcgccagctggcgtaatagcgaagaggcccgcaccgatcgcccttcccaacagttgcgcagcctgaatggcgaatgggacgcgccctgtagcggcgcattaagcgcggcgggtgtggtggttacgcgcagcgtgaccgctacacttgccagcgccctagcgcccgctcctttcgctttcttcccttcctttctcgccacgttcgccggctttccccgtcaagctctaaatcgggggctccctttagggttccgatttagtgctttacggcacctcgaccccaaaaaacttgattagggtgatggttcacgtagtgggccatcgccctgatagacggtttttcgccctttgacgttggagtccacgttctttaatagtggactcttgttccaaactggaacaacactcaaccctatctcggtctattcttttgatttataagggattttgccgatttcggcctattggttaaaaaatgagctgatttaacaaaaatttaacgcgaattttaacaaaatattaacgcttacaatttaggtggcacttttcggggaaatgtgcgcggaacccctatttgtttatttttctaaatacattcaaatatgtatccgctcatgagacaataaccctgataaatgcttcaataatattgaaaaaggaagagtatgagtattcaacatttccgtgtcgcccttattcccttttttgcggcattttgccttcctgtttttgctcacccagaaacgctggtgaaagtaaaagatgctgaagatcagttgggtgcacgagtgggttacatcgaactggatctcaacagcggtaagatccttgagagttttcgccccgaagaacgttttccaatgatgagcacttttaaagttctgctatgtggcgcggtattatcccgtattgacgccgggcaagagcaactcggtcgccgcatacactattctcagaatgacttggttgagtactcaccagtcacagaaaagcatcttacggatggcatgacagtaagagaattatgcagtgctgccataaccatgagtgataacactgcggccaacttacttctgacaacgatcggaggaccgaaggagctaaccgcttttttgcacaacatgggggatcatgtaactcgccttgatcgttgggaaccggagctgaatgaagccataccaaacgacgagcgtgacaccacgatgcctgtagcaatggcaacaacgttgcgcaaactattaactggcgaactacttactctagcttcccggcaacaattaatagactggatggaggcggataaagttgcaggaccacttctgcgctcggcccttccggctggctggtttattgctgataaatctggagccggtgagcgtgggtctcgcggtatcattgcagcactggggccagatggtaagccctcccgtatcgtagttatctacacgacggggagtcaggcaactatggatgaacgaaatagacagatcgctgagataggtgcctcactgattaagcattggtaactgtcagaccaagtttactcatatatactttagattgatttaaaacttcatttttaatttaaaaggatctaggtgaagatcctttttgataatctcatgaccaaaatcccttaacgtgagttttcgttccactgagcgtcagaccccgtagaaaagatcaaaggatcttcttgagatcctttttttctgcgcgtaatctgctgcttgcaaacaaaaaaaccaccgctaccagcggtggtttgtttgccggatcaagagctaccaactctttttccgaaggtaactggcttcagcagagcgcagataccaaatactgttcttctagtgtagccgtagttaggccaccacttcaagaactctgtagcaccgcctacatacctcgctctgctaatcctgttaccagtggctgctgccagtggcgataagtcgtgtcttaccgggttggactcaagacgatagttaccggataaggcgcagcggtcgggctgaacggggggttcgtgcacacagcccagcttggagcgaacgacctacaccgaactgagatacctacagcgtgagctatgagaaagcgccacgcttcccgaagggagaaaggcggacaggtatccggtaagcggcagggtcggaacaggagagcgcacgagggagcttccagggggaaacgcctggtatctttatagtcctgtcgggtttcgccacctctgacttgagcgtcgatttttgtgatgctcgtcaggggggcggagcctatggaaaaacgccagcaacgcggcctttttacggttcctggccttttgctggccttttgctcacatgttctttcctgcgttatcccctgattctgtggataaccgtattaccgcctttgagtgagctgataccgctcgccgcagccgaacgaccgagcgcagcgagtcagtgagcgaggaagcggaagagcgcccaatacgcaaaccgcctctccccgcgcgttggccgattcattaatgcagctggcacgacaggtttcccgactggaaagcgggcagtgagcgcaacgcaattaatgtgagttagctcactcattaggcaccccaggctttacactttatgcttccggctcgtatgttgtgtggaattgtgagcggataacaatttcacacaggaaacagctatgaccatgattacgccagatttaattaag

SEQ ID NO: 35 - DNA, 4892 bp, Artificial Sequence
  Description of Artificial Sequence: Synthetic polynucleotide
gccttaattaggctgcgcgctcgctcgctcactgaggccgcccgggcaaagcccgggcgtcgggcgacctttggtcgcccggcctcagtgagcgagcgagcgcgcagagagggagtggccaactccatcactaggggttccttgtagttaatgattaacccgccatgctacttatctaccagggtaatggggatcctctagaactatagctagtcgacattgattattgactagttattaatagtaatcaattacggggtcattagttcatagcccatatatggagttccgcgttacataacttacggtaaatggcccgcctggctgaccgcccaacgacccccgcccattgacgtcaataatgacgtatgttcccatagtaacgccaatagggactttccattgacgtcaatgggtggagtatttacggtaaactgcccacttggcagtacatcaagtgtatcatatgccaagtacgccccctattgacgtcaatgacggtaaatggcccgcctggcattatgcccagtacatgaccttatgggactttcctacttggcagtacatctacgtattagtcatcgctattaccatgtcgaggccacgttctgcttcactctccccatctcccccccctccccacccccaattttgtatttatttattttttaattattttgtgcagcgatgggggcggggggggggggcgcgcgccaggcggggcggggcggggcgaggggcggggcggggcgaggcggagaggtgcggcggcagccaatcagagcggcgcgctccgaaagtttccttttatggcgaggcggcggcggcggcggccctataaaaagcgaagcgcgcggcgggcgggagcaagcttgaactgaaaaaccagaaagttaactggtaagtttagtctttttgtcttttatttcaggtcccggatccggtggtggtgcaaatcaaagaactgctcctcagtggatgttgcctttacttctaggcctgtacggaagtgttacttctgctctaaaagctgcggaattgtacccgcggccgatccaccggtgccgccaccatgtggacactcgggaggagggccgtggctgggctgcttgcttcaccatcacccgcacaggctcagaccctgacaagggtcccaaggccagctgagctggccccactgtgcggtcggagaggactgcgaaccgatatcgatgctacgtgtaccccaaggcgagcaagcagcaaccagcgagggctgaaccagatttggaatgtcaagaaacagagtgtctacctgatgaatctccgaaagtccggcactctgggtcaccctggcagcctggacgaaacgacctacgagcggctggctgaggaaaccctggattccctggccgagttcttcgaagacctggctgataagccatacaccttcgaagactatgacgtgagtttcggcagcggcgtgctgacagtgaaactgggcggggacctgggaacttacgttatcaacaagcagactcctaataagcagatttggctgtctagtccctcaagcggcccaaaaaggtatgactggacaggcaaaaactgggtgtactcccacgatggagtcagtctgcatgagcttctggccgctgaacttactaaggcgctgaaaactaaactggatctgagctccctcgcttacagcgggaaagacgcataactcgaggacggggtgaactacgcctgaggatccgatctttttccctctgccaaaaattatggggacatcatgaagccccttgagcatctgacttctggctaataaaggaaatttattttcattgcaatagtgtgttggaattttttgtgtctctcactcggaagcaattcgttgatctgaatttcgaccacccataatacccattaccctggtagataagtagcatggcgggttaatcattaactacaaggaacccctagtgatggagttggccactccctctctgcgcgctcgctcgctcactgaggccgggcgaccaaaggtcgcccgacgcccgggctttgcccgggcggcctcagtgagcgagcgagcgcgcagccttaattaacctaattcactggccgtcgttttacaacgtcgtgactgggaaaaccctggcgttacccaacttaatcgccttgcagcacatccccctttcgccagctggcgtaatagcgaagaggcccgcaccgatcgcccttcccaacagttgcgcagcctgaatggcgaatgggacgcgccctgtagcggcgcattaagcgcggcgggtgtggtggttacgcgcagcgtgaccgctacacttgccagcgccctagcgcccgctcctttcgctttcttcccttcctttctcgccacgttcgccggctttccccgtcaagctctaaatcgggggctccctttagggttccgatttagtgctttacggcacctcgaccccaaaaaacttgattagggtgatggttcacgtagtgggccatcgccctgatagacggtttttcgccctttgacgttggagtccacgttctttaatagtggactcttgttccaaactggaacaacactcaaccctatctcggtctattcttttgatttataagggattttgccgatttcggcctattggttaaaaaatgagctgatttaacaaaaatttaacgcgaattttaacaaaatattaacgcttacaatttaggtggcacttttcggggaaatgtgcgcggaacccctatttgtttatttttctaaatacattcaaatatgtatccgctcatgagacaataaccctgataaatgcttcaataatattgaaaaaggaagagtatgagtattcaacatttccgtgtcgcccttattcccttttttgcggcattttgccttcctgtttttgctcacccagaaacgctggtgaaagtaaaagatgctgaagatcagttgggtgcacgagtgggttacatcgaactggatctcaacagcggtaagatccttgagagttttcgccccgaagaacgttttccaatgatgagcacttttaaagttctgctatgtggcgcggtattatcccgtattgacgccgggcaagagcaactcggtcgccgcatacactattctcagaatgacttggttgagtactcaccagtcacagaaaagcatcttacggatggcatgacagtaagagaattatgcagtgctgccataaccatgagtgataacactgcggccaacttacttctgacaacgatcggaggaccgaaggagctaaccgcttttttgcacaacatgggggatcatgtaactcgccttgatcgttgggaaccggagctgaatgaagccataccaaacgacgagcgtgacaccacgatgcctgtagcaatggcaacaacgttgcgcaaactattaactggcgaactacttactctagcttcccggcaacaattaatagactggatggaggcggataaagttgcaggaccacttctgcgctcggcccttccggctggctggtttattgctgataaatctggagccggtgagcgtgggtctcgcggtatcattgcagcactggggccagatggtaagccctcccgtatcgtagttatctacacgacggggagtcaggcaactatggatgaacgaaatagacagatcgctgagataggtgcctcactgattaagcattggtaactgtcagaccaagtttactcatatatactttagattgatttaaaacttcatttttaatttaaaaggatctaggtgaagatcctttttgataatctcatgaccaaaatcccttaacgtgagttttcgttccactgagcgtcagaccccgtagaaaagatcaaaggatcttcttgagatcctttttttctgcgcgtaatctgctgcttgcaaacaaaaaaaccaccgctaccagcggtggtttgtttgccggatcaagagctaccaactctttttccgaaggtaactggcttcagcagagcgcagataccaaatactgttcttctagtgtagccgtagttaggccaccacttcaagaactctgtagcaccgcctacatacctcgctctgctaatcctgttaccagtggctgctgccagtggcgataagtcgtgtcttaccgggttggactcaagacgatagttaccggataaggcgcagcggtcgggctgaacggggggttcgtgcacacagcccagcttggagcgaacgacctacaccgaactgagatacctacagcgtgagctatgagaaagcgccacgcttcccgaagggagaaaggcggacaggtatccggtaagcggcagggtcggaacaggagagcgcacgagggagcttccagggggaaacgcctggtatctttatagtcctgtcgggtttcgccacctctgacttgagcgtcgatttttgtgatgctcgtcaggggggcggagcctatggaaaaacgccagcaacgcggcctttttacggttcctggccttttgctggccttttgctcacatgttctttcctgcgttatcccctgattctgtggataaccgtattaccgcctttgagtgagctgataccgctcgccgcagccgaacgaccgagcgcagcgagtcagtgagcgaggaagcggaagagcgcccaatacgcaaaccgcctctccccgcgcgttggccgattcattaatgcagctggcacgacaggtttcccgactggaaagcgggcagtgagcgcaacgcaattaatgtgagttagctcactcattaggcaccccaggctttacactttatgcttccggctcgtatgttgtgtggaattgtgagcggataacaatttcacacaggaaacagctatgaccatgattacgccagatttaattaag

SEQ ID NO: 36 - DNA, 4892 bp, Artificial Sequence
  Description of Artificial Sequence: Synthetic polynucleotide
gccttaattaggctgcgcgctcgctcgctcactgaggccgcccgggcaaagcccgggcgtcgggcgacctttggtcgcccggcctcagtgagcgagcgagcgcgcagagagggagtggccaactccatcactaggggttccttgtagttaatgattaacccgccatgctacttatctaccagggtaatggggatcctctagaactatagctagtcgacattgattattgactagttattaatagtaatcaattacggggtcattagttcatagcccatatatggagttccgcgttacataacttacggtaaatggcccgcctggctgaccgcccaacgacccccgcccattgacgtcaataatgacgtatgttcccatagtaacgccaatagggactttccattgacgtcaatgggtggagtatttacggtaaactgcccacttggcagtacatcaagtgtatcatatgccaagtacgccccctattgacgtcaatgacggtaaatggcccgcctggcattatgcccagtacatgaccttatgggactttcctacttggcagtacatctacgtattagtcatcgctattaccatgtcgaggccacgttctgcttcactctccccatctcccccccctccccacccccaattttgtatttatttattttttaattattttgtgcagcgatgggggcggggggggggggcgcgcgccaggcggggcggggcggggcgaggggcggggcggggcgaggcggagaggtgcggcggcagccaatcagagcggcgcgctccgaaagtttccttttatggcgaggcggcggcggcggcggccctataaaaagcgaagcgcgcggcgggcgggagcaagcttgaactgaaaaaccagaaagttaactggtaagtttagtctttttgtcttttatttcaggtcccggatccggtggtggtgcaaatcaaagaactgctcctcagtggatgttgcctttacttctaggcctgtacggaagtgttacttctgctctaaaagctgcggaattgtacccgcggccgatccaccggtgccgccaccatgtggacactggggaggagggccgtcgctgggctgctggcttcaccttcacccgctcaggctcagaccctcacaagagtgcctaggccagcagagctggccccactctgcgggcggagaggactgcgaaccgacatcgatgcaacatgtacccctaggcgagcaagctccaaccagcgaggcctgaaccagatttggaatgtgaagaaacagagtgtctacctgatgaatctgagaaagagcggcactctgggacacccaggcagcctggacgagaccacctacgagcggctggcagaggaaaccctggattctttggccgagttctttgaagaccttgctgataagccatacacattcgaagactatgacgtcagtttcggaagcggcgtgttgacagtcaaactgggcggagacctgggaacatacgtgatcaacaagcagactcctaacaagcaaatttggctttctagtccatcaagtggacctaagaggtatgactggacagggaagaactgggtgtacagccacgatggcgtctctctgcatgagctgctggccgctgaactgactaaggcactgaaaactaaactggacctgtcatccctggcttattctgggaaagacgcataactcgaggacggggtgaactacgcctgaggatccgatctttttccctctgccaaaaattatggggacatcatgaagccccttgagcatctgacttctggctaataaaggaaatttattttcattgcaatagtgtgttggaattttttgtgtctctcactcggaagcaattcgttgatctgaatttcgaccacccataatacccattaccctggtagataagtagcatggcgggttaatcattaactacaaggaacccctagtgatggagttggccactccctctctgcgcgctcgctcgctcactgaggccgggcgaccaaaggtcgcccgacgcccgggctttgcccgggcggcctcagtgagcgagcgagcgcgcagccttaattaacctaattcactggccgtcgttttacaacgtcgtgactgggaaaaccctggcgttacccaacttaatcgccttgcagcacatccccctttcgccagctggcgtaatagcgaagaggcccgcaccgatcgcccttcccaacagttgcgcagcctgaatggcgaatgggacgcgccctgtagcggcgcattaagcgcggcgggtgtggtggttacgcgcagcgtgaccgctacacttgccagcgccctagcgcccgctcctttcgctttcttcccttcctttctcgccacgttcgccggctttccccgtcaagctctaaatcgggggctccctttagggttccgatttagtgctttacggcacctcgaccccaaaaaacttgattagggtgatggttcacgtagtgggccatcgccctgatagacggtttttcgccctttgacgttggagtccacgttctttaatagtggactcttgttccaaactggaacaacactcaaccctatctcggtctattcttttgatttataagggattttgccgatttcggcctattggttaaaaaatgagctgatttaacaaaaatttaacgcgaattttaacaaaatattaacgcttacaatttaggtggcacttttcggggaaatgtgcgcggaacccctatttgtttatttttctaaatacattcaaatatgtatccgctcatgagacaataaccctgataaatgcttcaataatattgaaaaaggaagagtatgagtattcaacatttccgtgtcgcccttattcccttttttgcggcattttgccttcctgtttttgctcacccagaaacgctggtgaaagtaaaagatgctgaagatcagttgggtgcacgagtgggttacatcgaactggatctcaacagcggtaagatccttgagagttttcgccccgaagaacgttttccaatgatgagcacttttaaagttctgctatgtggcgcggtattatcccgtattgacgccgggcaagagcaactcggtcgccgcatacactattctcagaatgacttggttgagtactcaccagtcacagaaaagcatcttacggatggcatgacagtaagagaattatgcagtgctgccataaccatgagtgataacactgcggccaacttacttctgacaacgatcggaggaccgaaggagctaaccgcttttttgcacaacatgggggatcatgtaactcgccttgatcgttgggaaccggagctgaatgaagccataccaaacgacgagcgtgacaccacgatgcctgtagcaatggcaacaacgttgcgcaaactattaactggcgaactacttactctagcttcccggcaacaattaatagactggatggaggcggataaagttgcaggaccacttctgcgctcggcccttccggctggctggtttattgctgataaatctggagccggtgagcgtgggtctcgcggtatcattgcagcactggggccagatggtaagccctcccgtatcgtagttatctacacgacggggagtcaggcaactatggatgaacgaaatagacagatcgctgagataggtgcctcactgattaagcattggtaactgtcagaccaagtttactcatatatactttagattgatttaaaacttcatttttaatttaaaaggatctaggtgaagatcctttttgataatctcatgaccaaaatcccttaacgtgagttttcgttccactgagcgtcagaccccgtagaaaagatcaaaggatcttcttgagatcctttttttctgcgcgtaatctgctgcttgcaaacaaaaaaaccaccgctaccagcggtggtttgtttgccggatcaagagctaccaactctttttccgaaggtaactggcttcagcagagcgcagataccaaatactgttcttctagtgtagccgtagttaggccaccacttcaagaactctgtagcaccgcctacatacctcgctctgctaatcctgttaccagtggctgctgccagtggcgataagtcgtgtcttaccgggttggactcaagacgatagttaccggataaggcgcagcggtcgggctgaacggggggttcgtgcacacagcccagcttggagcgaacgacctacaccgaactgagatacctacagcgtgagctatgagaaagcgccacgcttcccgaagggagaaaggcggacaggtatccggtaagcggcagggtcggaacaggagagcgcacgagggagcttccagggggaaacgcctggtatctttatagtcctgtcgggtttcgccacctctgacttgagcgtcgatttttgtgatgctcgtcaggggggcggagcctatggaaaaacgccagcaacgcggcctttttacggttcctggccttttgctggccttttgctcacatgttctttcctgcgttatcccctgattctgtggataaccgtattaccgcctttgagtgagctgataccgctcgccgcagccgaacgaccgagcgcagcgagtcagtgagcgaggaagcggaagagcgcccaatacgcaaaccgcctctccccgcgcgttggccgattcattaatgcagctggcacgacaggtttcccgactggaaagcgggcagtgagcgcaacgcaattaatgtgagttagctcactcattaggcaccccaggctttacactttatgcttccggctcgtatgttgtgtggaattgtgagcggataacaatttcacacaggaaacagctatgaccatgattacgccagatttaattaag

SEQ ID NO: 37 - DNA, 4865 bp, Artificial Sequence
  Description of Artificial Sequence: Synthetic polynucleotide
gccttaattaggctgcgcgctcgctcgctcactgaggccgcccgggcaaagcccgggcgtcgggcgacctttggtcgcccggcctcagtgagcgagcgagcgcgcagagagggagtggccaactccatcactaggggttccttgtagttaatgattaacccgccatgctacttatctaccagggtaatggggatcctctagaactatagctagtcgacattgattattgactagttattaatagtaatcaattacggggtcattagttcatagcccatatatggagttccgcgttacataacttacggtaaatggcccgcctggctgaccgcccaacgacccccgcccattgacgtcaataatgacgtatgttcccatagtaacgccaatagggactttccattgacgtcaatgggtggagtatttacggtaaactgcccacttggcagtacatcaagtgtatcatatgccaagtacgccccctattgacgtcaatgacggtaaatggcccgcctggcattatgcccagtacatgaccttatgggactttcctacttggcagtacatctacgtattagtcatcgctattaccatgtcgaggccacgttctgcttcactctccccatctcccccccctccccacccccaattttgtatttatttattttttaattattttgtgcagcgatgggggcggggggggggggcgcgcgccaggcggggcggggcggggcgaggggcggggcggggcgaggcggagaggtgcggcggcagccaatcagagcggcgcgctccgaaagtttccttttatggcgaggcggcggcggcggcggccctataaaaagcgaagcgcgcggcgggcgggagcaagcttgaactgaaaaaccagaaagttaactggtaagtttagtctttttgtcttttatttcaggtcccggatccggtggtggtgcaaatcaaagaactgctcctcagtggatgttgcctttacttctaggcctgtacggaagtgttacttctgctctaaaagctgcggaattgtacccgcggccgatccaccggtgccgccaccatggctgtagctgcagtaaaatgggtgatgtcaaagagaactatcttgaaacatttatttccagtccaaaatggagctttatattgtgtttgtcatctgcgcaccgacatcgatgcgacctgcacgccccgccgcgcaagttcgaaccaacgtggcctcaaccagatttggaatgtcaaaaagcagagtgtctatttgatgaatttgaggaaatctggaactttgggccacccaggctctctagatgagaccacctatgaaagactagcagaggaaacgctggactctttagcagagttttttgaagaccttgcagacaagccatacacgtttgaggactatgatgtctcctttgggagtggtgtcttaactgtcaaactgggtggagatctaggaacctatgtgatcaacaagcagacgccaaacaagcaaatctggctatcttctccatccagtggacctaagcgttatgactggactgggaaaaactgggtgttctcccacgacggcgtgtccctccatgagctgctggccgcagagctcactaaagccttaaaaaccaaactggacttgtcttggttggcctattccggaaaagatgcttgactcgaggacggggtgaactacgcctgaggatccgatctttttccctctgccaaaaattatggggacatcatgaagccccttgagcatctgacttctggctaataaaggaaatttattttcattgcaatagtgtgttggaattttttgtgtctctcactcggaagcaattcgttgatctgaatttcgaccacccataatacccattaccctggtagataagtagcatggcgggttaatcattaactacaaggaacccctagtgatggagttggccactccctctctgcgcgctcgctcgctcactgaggccgggcgaccaaaggtcgcccgacgcccgggctttgcccgggcggcctcagtgagcgagcgagcgcgcagccttaattaacctaattcactggccgtcgttttacaacgtcgtgactgggaaaaccctggcgttacccaacttaatcgccttgcagcacatccccctttcgccagctggcgtaatagcgaagaggcccgcaccgatcgcccttcccaacagttgcgcagcctgaatggcgaatgggacgcgccctgtagcggcgcattaagcgcggcgggtgtggtggttacgcgcagcgtgaccgctacacttgccagcgccctagcgcccgctcctttcgctttcttcccttcctttctcgccacgttcgccggctttccccgtcaagctctaaatcgggggctccctttagggttccgatttagtgctttacggcacctcgaccccaaaaaacttgattagggtgatggttcacgtagtgggccatcgccctgatagacggtttttcgccctttgacgttggagtccacgttctttaatagtggactcttgttccaaactggaacaacactcaaccctatctcggtctattcttttgatttataagggattttgccgatttcggcctattggttaaaaaatgagctgatttaacaaaaatttaacgcgaattttaacaaaatattaacgcttacaatttaggtggcacttttcggggaaatgtgcgcggaacccctatttgtttatttttctaaatacattcaaatatgtatccgctcatgagacaataaccctgataaatgcttcaataatattgaaaaaggaagagtatgagtattcaacatttccgtgtcgcccttattcccttttttgcggcattttgccttcctgtttttgctcacccagaaacgctggtgaaagtaaaagatgctgaagatcagttgggtgcacgagtgggttacatcgaactggatctcaacagcggtaagatccttgagagttttcgccccgaagaacgttttccaatgatgagcacttttaaagttctgctatgtggcgcggtattatcccgtattgacgccgggcaagagcaactcggtcgccgcatacactattctcagaatgacttggttgagtactcaccagtcacagaaaagcatcttacggatggcatgacagtaagagaattatgcagtgctgccataaccatgagtgataacactgcggccaacttacttctgacaacgatcggaggaccgaaggagctaaccgcttttttgcacaacatgggggatcatgtaactcgccttgatcgttgggaaccggagctgaatgaagccataccaaacgacgagcgtgacaccacgatgcctgtagcaatggcaacaacgttgcgcaaactattaactggcgaactacttactctagcttcccggcaacaattaatagactggatggaggcggataaagttgcaggaccacttctgcgctcggcccttccggctggctggtttattgctgataaatctggagccggtgagcgtgggtctcgcggtatcattgcagcactggggccagatggtaagccctcccgtatcgtagttatctacacgacggggagtcaggcaactatggatgaacgaaatagacagatcgctgagataggtgcctcactgattaagcattggtaactgtcagaccaagtttactcatatatactttagattgatttaaaacttcatttttaatttaaaaggatctaggtgaagatcctttttgataatctcatgaccaaaatcccttaacgtgagttttcgttccactgagcgtcagaccccgtagaaaagatcaaaggatcttcttgagatcctttttttctgcgcgtaatctgctgcttgcaaacaaaaaaaccaccgctaccagcggtggtttgtttgccggatcaagagctaccaactctttttccgaaggtaactggcttcagcagagcgcagataccaaatactgttcttctagtgtagccgtagttaggccaccacttcaagaactctgtagcaccgcctacatacctcgctctgctaatcctgttaccagtggctgctgccagtggcgataagtcgtgtcttaccgggttggactcaagacgatagttaccggataaggcgcagcggtcgggctgaacggggggttcgtgcacacagcccagcttggagcgaacgacctacaccgaactgagatacctacagcgtgagctatgagaaagcgccacgcttcccgaagggagaaaggcggacaggtatccggtaagcggcagggtcggaacaggagagcgcacgagggagcttccagggggaaacgcctggtatctttatagtcctgtcgggtttcgccacctctgacttgagcgtcgatttttgtgatgctcgtcaggggggcggagcctatggaaaaacgccagcaacgcggcctttttacggttcctggccttttgctggccttttgctcacatgttctttcctgcgttatcccctgattctgtggataaccgtattaccgcctttgagtgagctgataccgctcgccgcagccgaacgaccgagcgcagcgagtcagtgagcgaggaagcggaagagcgcccaatacgcaaaccgcctctccccgcgcgttggccgattcattaatgcagctggcacgacaggtttcccgactggaaagcgggcagtgagcgcaacgcaattaatgtgagttagctcactcattaggcaccccaggctttacactttatgcttccggctcgtatgttgtgtggaattgtgagcggataacaatttcacacaggaaacagctatgaccatgattacgccagatttaattaag

SEQ ID NO: 38 - DNA, 4865 bp, Artificial Sequence
  Description of Artificial Sequence: Synthetic polynucleotide
gccttaattaggctgcgcgctcgctcgctcactgaggccgcccgggcaaagcccgggcgtcgggcgacctttggtcgcccggcctcagtgagcgagcgagcgcgcagagagggagtggccaactccatcactaggggttccttgtagttaatgattaacccgccatgctacttatctaccagggtaatggggatcctctagaactatagctagtcgacattgattattgactagttattaatagtaatcaattacggggtcattagttcatagcccatatatggagttccgcgttacataacttacggtaaatggcccgcctggctgaccgcccaacgacccccgcccattgacgtcaataatgacgtatgttcccatagtaacgccaatagggactttccattgacgtcaatgggtggagtatttacggtaaactgcccacttggcagtacatcaagtgtatcatatgccaagtacgccccctattgacgtcaatgacggtaaatggcccgcctggcattatgcccagtacatgaccttatgggactttcctacttggcagtacatctacgtattagtcatcgctattaccatgtcgaggccacgttctgcttcactctccccatctcccccccctccccacccccaattttgtatttatttattttttaattattttgtgcagcgatgggggcggggggggggggcgcgcgccaggcggggcggggcggggcgaggggcggggcggggcgaggcggagaggtgcggcggcagccaatcagagcggcgcgctccgaaagtttccttttatggcgaggcggcggcggcggcggccctataaaaagcgaagcgcgcggcgggcgggagcaagcttgaactgaaaaaccagaaagttaactggtaagtttagtctttttgtcttttatttcaggtcccggatccggtggtggtgcaaatcaaagaactgctcctcagtggatgttgcctttacttctaggcctgtacggaagtgttacttctgctctaaaagctgcggaattgtacccgcggccgatccaccggtgccgccaccatggctgtagctgcagtaaaatgggtgatgtcaaagagaactatcttgaaacatttatttccagtccaaaatggagctttatattgtgtttgtcatctgcgaaccgacatcgatgcaacatgtacccctaggcgagcaagctccaaccagcgaggcctgaaccagatttggaatgtgaagaaacagagtgtctacctgatgaatctgagaaagagcggcactctgggacacccaggcagcctggacgagaccacctacgagcggctggcagaggaaaccctggattctttggccgagttctttgaagaccttgctgataagccatacacattcgaagactatgacgtcagtttcggaagcggcgtgttgacagtcaaactgggcggagacctgggaacatacgtgatcaacaagcagactcctaacaagcaaatttggctttctagtccatcaagtggacctaagaggtatgactggacagggaagaactgggtgtacagccacgatggcgtctctctgcatgagctgctggccgctgaactgactaaggcactgaaaactaaactggacctgtcatccctggcttattctgggaaagacgcataactcgaggacggggtgaactacgcctgaggatccgatctttttccctctgccaaaaattatggggacatcatgaagccccttgagcatctgacttctggctaataaaggaaatttattttcattgcaatagtgtgttggaattttttgtgtctctcactcggaagcaattcgttgatctgaatttcgaccacccataatacccattaccctggtagataagtagcatggcgggttaatcattaactacaaggaacccctagtgatggagttggccactccctctctgcgcgctcgctcgctcactgaggccgggcgaccaaaggtcgcccgacgcccgggctttgcccgggcggcctcagtgagcgagcgagcgcgcagccttaattaacctaattcactggccgtcgttttacaacgtcgtgactgggaaaaccctggcgttacccaacttaatcgccttgcagcacatccccctttcgccagctggcgtaatagcgaagaggcccgcaccgatcgcccttcccaacagttgcgcagcctgaatggcgaatgggacgcgccctgtagcggcgcattaagcgcggcgggtgtggtggttacgcgcagcgtgaccgctacacttgccagcgccctagcgcccgctcctttcgctttcttcccttcctttctcgccacgttcgccggctttccccgtcaagctctaaatcgggggctccctttagggttccgatttagtgctttacggcacctcgaccccaaaaaacttgattagggtgatggttcacgtagtgggccatcgccctgatagacggtttttcgccctttgacgttggagtccacgttctttaatagtggactcttgttccaaactggaacaacactcaaccctatctcggtctattcttttgatttataagggattttgccgatttcggcctattggttaaaaaatgagctgatttaacaaaaatttaacgcgaattttaacaaaatattaacgcttacaatttaggtggcacttttcggggaaatgtgcgcggaacccctatttgtttatttttctaaatacattcaaatatgtatccgctcatgagacaataaccctgataaatgcttcaataatattgaaaaaggaagagtatgagtattcaacatttccgtgtcgcccttattcccttttttgcggcattttgccttcctgtttttgctcacccagaaacgctggtgaaagtaaaagatgctgaagatcagttgggtgcacgagtgggttacatcgaactggatctcaacagcggtaagatccttgagagttttcgccccgaagaacgttttccaatgatgagcacttttaaagttctgctatgtggcgcggtattatcccgtattgacgccgggcaagagcaactcggtcgccgcatacactattctcagaatgacttggttgagtactcaccagtcacagaaaagcatcttacggatggcatgacagtaagagaattatgcagtgctgccataaccatgagtgataacactgcggccaacttacttctgacaacgatcggaggaccgaaggagctaaccgcttttttgcacaacatgggggatcatgtaactcgccttgatcgttgggaaccggagctgaatgaagccataccaaacgacgagcgtgacaccacgatgcctgtagcaatggcaacaacgttgcgcaaactattaactggcgaactacttactctagcttcccggcaacaattaatagactggatggaggcggataaagttgcaggaccacttctgcgctcggcccttccggctggctggtttattgctgataaatctggagccggtgagcgtgggtctcgcggtatcattgcagcactggggccagatggtaagccctcccgtatcgtagttatctacacgacggggagtcaggcaactatggatgaacgaaatagacagatcgctgagataggtgcctcactgattaagcattggtaactgtcagaccaagtttactcatatatactttagattgatttaaaacttcatttttaatttaaaaggatctaggtgaagatcctttttgataatctcatgaccaaaatcccttaacgtgagttttcgttccactgagcgtcagaccccgtagaaaagatcaaaggatcttcttgagatcctttttttctgcgcgtaatctgctgcttgcaaacaaaaaaaccaccgctaccagcggtggtttgtttgccggatcaagagctaccaactctttttccgaaggtaactggcttcagcagagcgcagataccaaatactgttcttctagtgtagccgtagttaggccaccacttcaagaactctgtagcaccgcctacatacctcgctctgctaatcctgttaccagtggctgctgccagtggcgataagtcgtgtcttaccgggttggactcaagacgatagttaccggataaggcgcagcggtcgggctgaacggggggttcgtgcacacagcccagcttggagcgaacgacctacaccgaactgagatacctacagcgtgagctatgagaaagcgccacgcttcccgaagggagaaaggcggacaggtatccggtaagcggcagggtcggaacaggagagcgcacgagggagcttccagggggaaacgcctggtatctttatagtcctgtcgggtttcgccacctctgacttgagcgtcgatttttgtgatgctcgtcaggggggcggagcctatggaaaaacgccagcaacgcggcctttttacggttcctggccttttgctggccttttgctcacatgttctttcctgcgttatcccctgattctgtggataaccgtattaccgcctttgagtgagctgataccgctcgccgcagccgaacgaccgagcgcagcgagtcagtgagcgaggaagcggaagagcgcccaatacgcaaaccgcctctccccgcgcgttggccgattcattaatgcagctggcacgacaggtttcccgactggaaagcgggcagtgagcgcaacgcaattaatgtgagttagctcactcattaggcaccccaggctttacactttatgcttccggctcgtatgttgtgtggaattgtgagcggataacaatttcacacaggaaacagctatgaccatgattacgccagatttaattaag

SEQ ID NO: 39 - DNA, 4841 bp, Artificial Sequence
  Description of Artificial Sequence: Synthetic polynucleotide
gccttaattaggctgcgcgctcgctcgctcactgaggccgcccgggcaaagcccgggcgtcgggcgacctttggtcgcccggcctcagtgagcgagcgagcgcgcagagagggagtggccaactccatcactaggggttccttgtagttaatgattaacccgccatgctacttatctaccagggtaatggggatcctctagaactatagctagtcgacattgattattgactagttattaatagtaatcaattacggggtcattagttcatagcccatatatggagttccgcgttacataacttacggtaaatggcccgcctggctgaccgcccaacgacccccgcccattgacgtcaataatgacgtatgttcccatagtaacgccaatagggactttccattgacgtcaatgggtggagtatttacggtaaactgcccacttggcagtacatcaagtgtatcatatgccaagtacgccccctattgacgtcaatgacggtaaatggcccgcctggcattatgcccagtacatgaccttatgggactttcctacttggcagtacatctacgtattagtcatcgctattaccatgtcgaggccacgttctgcttcactctccccatctcccccccctccccacccccaattttgtatttatttattttttaattattttgtgcagcgatgggggcggggggggggggcgcgcgccaggcggggcggggcggggcgaggggcggggcggggcgaggcggagaggtgcggcggcagccaatcagagcggcgcgctccgaaagtttccttttatggcgaggcggcggcggcggcggccctataaaaagcgaagcgcgcggcgggcgggagcaagcttgaactgaaaaaccagaaagttaactggtaagtttagtctttttgtcttttatttcaggtcccggatccggtggtggtgcaaatcaaagaactgctcctcagtggatgttgcctttacttctaggcctgtacggaagtgttacttctgctctaaaagctgcggaattgtacccgcggccgatccaccggtgccgccaccatgttgagccgggcagtgtgcggcaccagcaggcagctggctccggctttggggtatctgggctccaggcagctgcgcaccgacatcgatgcgacctgcacgccccgccgcgcaagttcgaaccaacgtggcctcaaccagatttggaatgtcaaaaagcagagtgtctatttgatgaatttgaggaaatctggaactttgggccacccaggctctctagatgagaccacctatgaaagactagcagaggaaacgctggactctttagcagagttttttgaagaccttgcagacaagccatacacgtttgaggactatgatgtctcctttgggagtggtgtcttaactgtcaaactgggtggagatctaggaacctatgtgatcaacaagcagacgccaaacaagcaaatctggctatcttctccatccagtggacctaagcgttatgactggactgggaaaaactgggtgttctcccacgacggcgtgtccctccatgagctgctggccgcagagctcactaaagccttaaaaaccaaactggacttgtcttggttggcctattccggaaaagatgcttgactcgaggacggggtgaactacgcctgaggatccgatctttttccctctgccaaaaattatggggacatcatgaagccccttgagcatctgacttctggctaataaaggaaatttattttcattgcaatagtgtgttggaattttttgtgtctctcactcggaagcaattcgttgatctgaatttcgaccacccataatacccattaccctggtagataagtagcatggcgggttaatcattaactacaaggaacccctagtgatggagttggccactccctctctgcgcgctcgctcgctcactgaggccgggcgaccaaaggtcgcccgacgcccgggctttgcccgggcggcctcagtgagcgagcgagcgcgcagccttaattaacctaattcactggccgtcgttttacaacgtcgtgactgggaaaaccctggcgttacccaacttaatcgccttgcagcacatccccctttcgccagctggcgtaatagcgaagaggcccgcaccgatcgcccttcccaacagttgcgcagcctgaatggcgaatgggacgcgccctgtagcggcgcattaagcgcggcgggtgtggtggttacgcgcagcgtgaccgctacacttgccagcgccctagcgcccgctcctttcgctttcttcccttcctttctcgccacgttcgccggctttccccgtcaagctctaaatcgggggctccctttagggttccgatttagtgctttacggcacctcgaccccaaaaaacttgattagggtgatggttcacgtagtgggccatcgccctgatagacggtttttcgccctttgacgttggagtccacgttctttaatagtggactcttgttccaaactggaacaacactcaaccctatctcggtctattcttttgatttataagggattttgccgatttcggcctattggttaaaaaatgagctgatttaacaaaaatttaacgcgaattttaacaaaatattaacgcttacaatttaggtggcacttttcggggaaatgtgcgcggaacccctatttgtttatttttctaaatacattcaaatatgtatccgctcatgagacaataaccctgataaatgcttcaataatattgaaaaaggaagagtatgagtattcaacatttccgtgtcgcccttattcccttttttgcggcattttgccttcctgtttttgctcacccagaaacgctggtgaaagtaaaagatgctgaagatcagttgggtgcacgagtgggttacatcgaactggatctcaacagcggtaagatccttgagagttttcgccccgaagaacgttttccaatgatgagcacttttaaagttctgctatgtggcgcggtattatcccgtattgacgccgggcaagagcaactcggtcgccgcatacactattctcagaatgacttggttgagtactcaccagtcacagaaaagcatcttacggatggcatgacagtaagagaattatgcagtgctgccataaccatgagtgataacactgcggccaacttacttctgacaacgatcggaggaccgaaggagctaaccgcttttttgcacaacatgggggatcatgtaactcgccttgatcgttgggaaccggagctgaatgaagccataccaaacgacgagcgtgacaccacgatgcctgtagcaatggcaacaacgttgcgcaaactattaactggcgaactacttactctagcttcccggcaacaattaatagactggatggaggcggataaagttgcaggaccacttctgcgctcggcccttccggctggctggtttattgctgataaatctggagccggtgagcgtgggtctcgcggtatcattgcagcactggggccagatggtaagccctcccgtatcgtagttatctacacgacggggagtcaggcaactatggatgaacgaaatagacagatcgctgagataggtgcctcactgattaagcattggtaactgtcagaccaagtttactcatatatactttagattgatttaaaacttcatttttaatttaaaaggatctaggtgaagatcctttttgataatctcatgaccaaaatcccttaacgtgagttttcgttccactgagcgtcagaccccgtagaaaagatcaaaggatcttcttgagatcctttttttctgcgcgtaatctgctgcttgcaaacaaaaaaaccaccgctaccagcggtggtttgtttgccggatcaagagctaccaactctttttccgaaggtaactggcttcagcagagcgcagataccaaatactgttcttctagtgtagccgtagttaggccaccacttcaagaactctgtagcaccgcctacatacctcgctctgctaatcctgttaccagtggctgctgccagtggcgataagtcgtgtcttaccgggttggactcaagacgatagttaccggataaggcgcagcggtcgggctgaacggggggttcgtgcacacagcccagcttggagcgaacgacctacaccgaactgagatacctacagcgtgagctatgagaaagcgccacgcttcccgaagggagaaaggcggacaggtatccggtaagcggcagggtcggaacaggagagcgcacgagggagcttccagggggaaacgcctggtatctttatagtcctgtcgggtttcgccacctctgacttgagcgtcgatttttgtgatgctcgtcaggggggcggagcctatggaaaaacgccagcaacgcggcctttttacggttcctggccttttgctggccttttgctcacatgttctttcctgcgttatcccctgattctgtggataaccgtattaccgcctttgagtgagctgataccgctcgccgcagccgaacgaccgagcgcagcgagtcagtgagcgaggaagcggaagagcgcccaatacgcaaaccgcctctccccgcgcgttggccgattcattaatgcagctggcacgacaggtttcccgactggaaagcgggcagtgagcgcaacgcaattaatgtgagttagctcactcattaggcaccccaggctttacactttatgcttccggctcgtatgttgtgtggaattgtgagcggataacaatttcacacaggaaacagctatgaccatgattacgccagatttaattaag

SEQ ID NO: 40 - DNA, 5950 bp, Artificial Sequence
  Description of Artificial Sequence: Synthetic polynucleotide
gccttaattaggctgcgcgctcgctcgctcactgaggccgcccgggcaaagcccgggcgtcgggcgacctttggtcgcccggcctcagtgagcgagcgagcgcgcagagagggagtggccaactccatcactaggggttccttgtagttaatgattaacccgccatgctacttatctaccagggtaatggggatcctctagaactatagctagtcgacattgattattgactagttattaatagtaatcaattacggggtcattagttcatagcccatatatggagttccgcgttacataacttacggtaaatggcccgcctggctgaccgcccaacgacccccgcccattgacgtcaataatgacgtatgttcccatagtaacgccaatagggactttccattgacgtcaatgggtggactatttacggtaaactgcccacttggcagtacatcaagtgtatcatatgccaagtacgccccctattgacgtcaatgacggtaaatggcccgcctggcattatgcccagtacatgaccttatgggactttcctacttggcagtacatctacgtattagtcatcgctattaccatgggtcgaggtgagccccacgttctgcttcactctccccatctcccccccctccccacccccaattttgtatttatttattttttaattattttgtgcagcgatgggggcggggggggggggggcgcgcgccaggcggggcggggcggggcgaggggcggggcggggcgaggcggagaggtgcggcggcagccaatcagagcggcgcgctccgaaagtttccttttatggcgaggcggcggcggcggcggccctataaaaagcgaagcgcgcggcgggcgggagtcgctgcgttgccttcgccccgtgccccgctccgcgccgcctcgcgccgcccgccccggctctgactgaccgcgttactcccacaggtgagcgggcgggacggcccttctcctccgggctgtaattagcgcttggtttaatgacggctcgtttcttttctgtggctgcgtgaaagccttaaagggctccgggagggccctttgtgcgggggggagcggctcggggggtgcgtgcgtgtgtgtgtgcgtggggagcgccgcgtgcggcccgcgctgcccggcggctgtgagcgctgcgggcgcggcgcggggctttgtgcgctccgcgtgtgcgcgaggggagcgcggccgggggcggtgccccgcggtgcgggggggctgcgaggggaacaaaggctgcgtgcggggtgtgtgcgtgggggggtgagcagggggtgtgggcgcggcggtcgggctgtaacccccccctgcacccccctccccgagttgctgagcacggcccggcttcgggtgcggggctccgtgcggggcgtggcgcggggctcgccgtgccgggcggggggtggcggcaggtgggggtgccgggcggggcggggccgcctcgggccggggagggctcgggggaggggcgcggcggccccggagcgccggcggctgtcgaggcgcggcgagccgcagccattgccttttatggtaatcgtgcgagagggcgcagggacttcctttgtcccaaatctggcggagccgaaatctgggaggcgccgccgcaccccctctagcgggcgcgggcgaagcggtgcggcgccggcaggaaggaaatgggcggggagggccttcgtgcgtcgccgcgccgccgtccccttctccatctccagcctcggggctgccgcagggggacggctgccttcgggggggacggggcagggcggggttcggcttctggcgtgtgaccggcggctctagagcctctgctaaccatgttcatgccttcttctttttcctacagctcctgggcaacgtgctggttgttgtgctgtctcatcattttggcaaagaattaagcttgaactgaaaaaccagaaagttaactggtaagtttagtctttttgtcttttatttcaggtcccggatccggtggtggtgcaaatcaaagaactgctcctcagtggatgttgcctttacttctaggcctgtacggaagtgttacttctgctctaaaagctgcggaattgtacccgcggccgatccaccggtatgtggactctcgggcgccgcgcagtagccggcctcctggcgtcacccagcccagcccaggcccagaccctcacccgggtcccgcggccggcagagttggccccactctgcggccgccgtggcctgcgcaccgacatcgatgcgacctgcacgccccgccgcgcaagttcgaaccaacgtggcctcaaccagatttggaatgtcaaaaagcagagtgtctatttgatgaatttgaggaaatctggaactttgggccacccaggctctctagatgagaccacctatgaaagactagcagaggaaacgctggactctttagcagagttttttgaagaccttgcagacaagccatacacgtttgaggactatgatgtctcctttgggagtggtgtcttaactgtcaaactgggtggagatctaggaacctatgtgatcaacaagcagacgccaaacaagcaaatctggctatcttctccatccagtggacctaagcgttatgactggactgggaaaaactgggtgtactcccacgacggcgtgtccctccatgagctgctggccgcagagctcactaaagccttaaaaaccaaactggacttgtcttccttggcctattccggaaaagatgcttgactcgaggacggggtgaactacgcctgaggatccgatctttttccctctgccaaaaattatggggacatcatgaagccccttgagcatctgacttctggctaataaaggaaatttattttcattgcaatagtgtgttggaattttttgtgtctctcactcggaagcaattcgttgatctgaatttcgaccacccataatacccattaccctggtagataagtagcatggcgggttaatcattaactacaaggaacccctagtgatggagttggccactccctctctgcgcgctcgctcgctcactgaggccgggcgaccaaaggtcgcccgacgcccgggctttgcccgggcggcctcagtgagcgagcgagcgcgcagccttaattaacctaattcactggccgtcgttttacaacgtcgtgactgggaaaaccctggcgttacccaacttaatcgccttgcagcacatccccctttcgccagctggcgtaatagcgaagaggcccgcaccgatcgcccttcccaacagttgcgcagcctgaatggcgaatgggacgcgccctgtagcggcgcattaagcgcggcgggtgtggtggttacgcgcagcgtgaccgctacacttgccagcgccctagcgcccgctcctttcgctttcttcccttcctttctcgccacgttcgccggctttccccgtcaagctctaaatcgggggctccctttagggttccgatttagtgctttacggcacctcgaccccaaaaaacttgattagggtgatggttcacgtagtgggccatcgccctgatagacggtttttcgccctttgacgttggagtccacgttctttaatagtggactcttgttccaaactggaacaacactcaaccctatctcggtctattcttttgatttataagggattttgccgatttcggcctattggttaaaaaatgagctgatttaacaaaaatttaacgcgaattttaacaaaatattaacgcttacaatttaggtggcacttttcggggaaatgtgcgcggaacccctatttgtttatttttctaaatacattcaaatatgtatccgctcatgagacaataaccctgataaatgcttcaataatattgaaaaaggaagagtatgagtattcaacatttccgtgtcgcccttattcccttttttgcggcattttgccttcctgtttttgctcacccagaaacgctggtgaaagtaaaagatgctgaagatcagttgggtgcacgagtgggttacatcgaactggatctcaacagcggtaagatccttgagagttttcgccccgaagaacgttttccaatgatgagcacttttaaagttctgctatgtggcgcggtattatcccgtattgacgccgggcaagagcaactcggtcgccgcatacactattctcagaatgacttggttgagtactcaccagtcacagaaaagcatcttacggatggcatgacagtaagagaattatgcagtgctgccataaccatgagtgataacactgcggccaacttacttctgacaacgatcggaggaccgaaggagctaaccgcttttttgcacaacatgggggatcatgtaactcgccttgatcgttgggaaccggagctgaatgaagccataccaaacgacgagcgtgacaccacgatgcctgtagcaatggcaacaacgttgcgcaaactattaactggcgaactacttactctagcttcccggcaacaattaatagactggatggaggcggataaagttgcaggaccacttctgcgctcggcccttccggctggctggtttattgctgataaatctggagccggtgagcgtgggtctcgcggtatcattgcagcactggggccagatggtaagccctcccgtatcgtagttatctacacgacggggagtcaggcaactatggatgaacgaaatagacagatcgctgagataggtgcctcactgattaagcattggtaactgtcagaccaagtttactcatatatactttagattgatttaaaacttcatttttaatttaaaaggatctaggtgaagatcctttttgataatctcatgaccaaaatcccttaacgtgagttttcgttccactgagcgtcagaccccgtagaaaagatcaaaggatcttcttgagatcctttttttctgcgcgtaatctgctgcttgcaaacaaaaaaaccaccgctaccagcggtggtttgtttgccggatcaagagctaccaactctttttccgaaggtaactggcttcagcagagcgcagataccaaatactgttcttctagtgtagccgtagttaggccaccacttcaagaactctgtagcaccgcctacatacctcgctctgctaatcctgttaccagtggctgctgccagtggcgataagtcgtgtcttaccgggttggactcaagacgatagttaccggataaggcgcagcggtcgggctgaacggggggttcgtgcacacagcccagcttggagcgaacgacctacaccgaactgagatacctacagcgtgagctatgagaaagcgccacgcttcccgaagggagaaaggcggacaggtatccggtaagcggcagggtcggaacaggagagcgcacgagggagcttccagggggaaacgcctggtatctttatagtcctgtcgggtttcgccacctctgacttgagcgtcgatttttgtgatgctcgtcaggggggcggagcctatggaaaaacgccagcaacgcggcctttttacggttcctggccttttgctggccttttgctcacatgttctttcctgcgttatcccctgattctgtggataaccgtattaccgcctttgagtgagctgataccgctcgccgcagccgaacgaccgagcgcagcgagtcagtgagcgaggaagcggaagagcgcccaatacgcaaaccgcctctccccgcgcgttggccgattcattaatgcagctggcacgacaggtttcccgactggaaagcgggcagtgagcgcaacgcaattaatgtgagttagctcactcattaggcaccccaggctttacactttatgcttccggctcgtatgttgtgtggaattgtgagcggataacaatttcacacaggaaacagctatgaccatgattacgccagatttaattaag

SEQ ID NO: 41 - DNA, 4748 bp, Artificial Sequence
  Description of Artificial Sequence: Synthetic polynucleotide
gccttaattaggctgcgcgctcgctcgctcactgaggccgcccgggcaaagcccgggcgtcgggcgacctttggtcgcccggcctcagtgagcgagcgagcgcgcagagagggagtggccaactccatcactaggggttccttgtagttaatgattaacccgccatgctacttatctaccagggtaatggggatcctctagaactataggttgacattgattattgactagttattaatagtaatcaattacggggtcattagttcatagcccatatatggagttccgcgttacataacttacggtaaatggcccgcctggctgaccgcccaacgacccccgcccattgacgtcaataatgacgtatgttcccatagtaacgccaatagggactttccattgacgtcaatgggtggagtatttacggtaaactgcccacttggcagtacatcaagtgtatcatatgccaagtacgccccctattgacgtcaatgacggtaaatggcccgcctggcattatgcccagtacatgaccttatgggactttcctacttggcagtacatctacgtattagtcatcgctattaccatggtgatgcggttttggcagtacatcaatgggcgtggatagcggtttgactcacggggatttccaagtctccaccccattgacgtcaatgggagtttgttttggcaccaaaatcaacgggactttccaaaatgtcgtaacaactccgccccattgacgcaaatgggcggtaggcgtgtacggtgggaggtctatataagcagagctctctggctaactagagaacccactgcttactggcttatcgaaattaatacgactcactatagggagacccaagctggctagcgtttaaacttcgggagcaagcttggtaccgagctcggatccgccgccaccatgtggactctcgggcgccgcgcagtagccggcctcctggcgtcacccagcccagcccaggcccagaccctcacccgggtcccgcggccggcagagttggccccactctgcggccgccgtggcctgcgcaccgacatcgatgcgacctgcacgccccgccgcgcaagttcgaaccaacgtggcctcaaccagatttggaatgtcaaaaagcagagtgtctatttgatgaatttgaggaaatctggaactttgggccacccaggctctctagatgagaccacctatgaaagactagcagaggaaacgctggactctttagcagagttttttgaagaccttgcagacaagccatacacgtttgaggactatgatgtctcctttgggagtggtgtcttaactgtcaaactgggtggagatctaggaacctatgtgatcaacaagcagacgccaaacaagcaaatctggctatcttctccatccagtggacctaagcgttatgactggactgggaaaaactgggtgtactcccacgacggcgtgtccctccatgagctgctggccgcagagctcactaaagccttaaaaaccaaactggacttgtcttccttggcctattccggaaaagatgcttgactcgaggacggggtgaactacgcctgaggatccgatctttttccctctgccaaaaattatggggacatcatgaagccccttgagcatctgacttctggctaataaaggaaatttattttcattgcaatagtgtgttggaattttttgtgtctctcactcggaagcaattcgttgatctgaatttcgaccacccataatacccattaccctggtagataagtagcatggcgggttaatcattaactacaaggaacccctagtgatggagttggccactccctctctgcgcgctcgctcgctcactgaggccgggcgaccaaaggtcgcccgacgcccgggctttgcccgggcggcctcagtgagcgagcgagcgcgcagccttaattaacctaattcactggccgtcgttttacaacgtcgtgactgggaaaaccctggcgttacccaacttaatcgccttgcagcacatccccctttcgccagctggcgtaatagcgaagaggcccgcaccgatcgcccttcccaacagttgcgcagcctgaatggcgaatgggacgcgccctgtagcggcgcattaagcgcggcgggtgtggtggttacgcgcagcgtgaccgctacacttgccagcgccctagcgcccgctcctttcgctttcttcccttcctttctcgccacgttcgccggctttccccgtcaagctctaaatcgggggctccctttagggttccgatttagtgctttacggcacctcgaccccaaaaaacttgattagggtgatggttcacgtagtgggccatcgccctgatagacggtttttcgccctttgacgttggagtccacgttctttaatagtggactcttgttccaaactggaacaacactcaaccctatctcggtctattcttttgatttataagggattttgccgatttcggcctattggttaaaaaatgagctgatttaacaaaaatttaacgcgaattttaacaaaatattaacgcttacaatttaggtggcacttttcggggaaatgtgcgcggaacccctatttgtttatttttctaaatacattcaaatatgtatccgctcatgagacaataaccctgataaatgcttcaataatattgaaaaaggaagagtatgagtattcaacatttccgtgtcgcccttattcccttttttgcggcattttgccttcctgtttttgctcacccagaaacgctggtgaaagtaaaagatgctgaagatcagttgggtgcacgagtgggttacatcgaactggatctcaacagcggtaagatccttgagagttttcgccccgaagaacgttttccaatgatgagcacttttaaagttctgctatgtggcgcggtattatcccgtattgacgccgggcaagagcaactcggtcgccgcatacactattctcagaatgacttggttgagtactcaccagtcacagaaaagcatcttacggatggcatgacagtaagagaattatgcagtgctgccataaccatgagtgataacactgcggccaacttacttctgacaacgatcggaggaccgaaggagctaaccgcttttttgcacaacatgggggatcatgtaactcgccttgatcgttgggaaccggagctgaatgaagccataccaaacgacgagcgtgacaccacgatgcctgtagcaatggcaacaacgttgcgcaaactattaactggcgaactacttactctagcttcccggcaacaattaatagactggatggaggcggataaagttgcaggaccacttctgcgctcggcccttccggctggctggtttattgctgataaatctggagccggtgagcgtgggtctcgcggtatcattgcagcactggggccagatggtaagccctcccgtatcgtagttatctacacgacggggagtcaggcaactatggatgaacgaaatagacagatcgctgagataggtgcctcactgattaagcattggtaactgtcagaccaagtttactcatatatactttagattgatttaaaacttcatttttaatttaaaaggatctaggtgaagatcctttttgataatctcatgaccaaaatcccttaacgtgagttttcgttccactgagcgtcagaccccgtagaaaagatcaaaggatcttcttgagatcctttttttctgcgcgtaatctgctgcttgcaaacaaaaaaaccaccgctaccagcggtggtttgtttgccggatcaagagctaccaactctttttccgaaggtaactggcttcagcagagcgcagataccaaatactgttcttctagtgtagccgtagttaggccaccacttcaagaactctgtagcaccgcctacatacctcgctctgctaatcctgttaccagtggctgctgccagtggcgataagtcgtgtcttaccgggttggactcaagacgatagttaccggataaggcgcagcggtcgggctgaacggggggttcgtgcacacagcccagcttggagcgaacgacctacaccgaactgagatacctacagcgtgagctatgagaaagcgccacgcttcccgaagggagaaaggcggacaggtatccggtaagcggcagggtcggaacaggagagcgcacgagggagcttccagggggaaacgcctggtatctttatagtcctgtcgggtttcgccacctctgacttgagcgtcgatttttgtgatgctcgtcaggggggcggagcctatggaaaaacgccagcaacgcggcctttttacggttcctggccttttgctggccttttgctcacatgttctttcctgcgttatcccctgattctgtggataaccgtattaccgcctttgagtgagctgataccgctcgccgcagccgaacgaccgagcgcagcgagtcagtgagcgaggaagcggaagagcgcccaatacgcaaaccgcctctccccgcgcgttggccgattcattaatgcagctggcacgacaggtttcccgactggaaagcgggcagtgagcgcaacgcaattaatgtgagttagctcactcattaggcaccccaggctttacactttatgcttccggctcgtatgttgtgtggaattgtgagcggataacaatttcacacaggaaacagctatgaccatgattacgccagatttaattaag

SEQ ID NO: 42 - DNA, 4910 bp, Artificial Sequence
  Description of Artificial Sequence: Synthetic polynucleotide
gccttaattaggctgcgcgctcgctcgctcactgaggccgcccgggcaaagcccgggcgtcgggcgacctttggtcgcccggcctcagtgagcgagcgagcgcgcagagagggagtggccaactccatcactaggggttccttgtagttaatgattaacccgccatgctacttatctaccagggtaatggggatcctctagaactataggttgacattgattattgactagttattaatagtaatcaattacggggtcattagttcatagcccatatatggagttccgcgttacataacttacggtaaatggcccgcctggctgaccgcccaacgacccccgcccattgacgtcaataatgacgtatgttcccatagtaacgccaatagggactttccattgacgtcaatgggtggagtatttacggtaaactgcccacttggcagtacatcaagtgtatcatatgccaagtacgccccctattgacgtcaatgacggtaaatggcccgcctggcattatgcccagtacatgaccttatgggactttcctacttggcagtacatctacgtattagtcatcgctattaccatggtgatgcggttttggcagtacatcaatgggcgtggatagcggtttgactcacggggatttccaagtctccaccccattgacgtcaatgggagtttgttttggcaccaaaatcaacgggactttccaaaatgtcgtaacaactccgccccattgacgcaaatgggcggtaggcgtgtacggtgggaggtctatataagcagagctctctggctaactagagaacccactgcttactggcttatcgaaattaatacgactcactatagggagacccaagctggctagcgtttaaacttcgggagcaagcttgaactgaaaaaccagaaagttaactggtaagtttagtctttttgtcttttatttcaggtcccggatccggtggtggtgcaaatcaaagaactgctcctcagtggatgttgcctttacttctaggcctgtacggaagtgttacttctgctctaaaagctgcggaattgtacccgcggccgatccaccggtatgtggactctcgggcgccgcgcagtagccggcctcctggcgtcacccagcccagcccaggcccagaccctcacccgggtcccgcggccggcagagttggccccactctgcggccgccgtggcctgcgcaccgacatcgatgcgacctgcacgccccgccgcgcaagttcgaaccaacgtggcctcaaccagatttggaatgtcaaaaagcagagtgtctatttgatgaatttgaggaaatctggaactttgggccacccaggctctctagatgagaccacctatgaaagactagcagaggaaacgctggactctttagcagagttttttgaagaccttgcagacaagccatacacgtttgaggactatgatgtctcctttgggagtggtgtcttaactgtcaaactgggtggagatctaggaacctatgtgatcaacaagcagacgccaaacaagcaaatctggctatcttctccatccagtggacctaagcgttatgactggactgggaaaaactgggtgtactcccacgacggcgtgtccctccatgagctgctggccgcagagctcactaaagccttaaaaaccaaactggacttgtcttccttggcctattccggaaaagatgcttgactcgaggacggggtgaactacgcctgaggatccgatctttttccctctgccaaaaattatggggacatcatgaagccccttgagcatctgacttctggctaataaaggaaatttattttcattgcaatagtgtgttggaattttttgtgtctctcactcggaagcaattcgttgatctgaatttcgaccacccataatacccattaccctggtagataagtagcatggcgggttaatcattaactacaaggaacccctagtgatggagttggccactccctctctgcgcgctcgctcgctcactgaggccgggcgaccaaaggtcgcccgacgcccgggctttgcccgggcggcctcagtgagcgagcgagcgcgcagccttaattaacctaattcactggccgtcgttttacaacgtcgtgactgggaaaaccctggcgttacccaacttaatcgccttgcagcacatccccctttcgccagctggcgtaatagcgaagaggcccgcaccgatcgcccttcccaacagttgcgcagcctgaatggcgaatgggacgcgccctgtagcggcgcattaagcgcggcgggtgtggtggttacgcgcagcgtgaccgctacacttgccagcgccctagcgcccgctcctttcgctttcttcccttcctttctcgccacgttcgccggctttccccgtcaagctctaaatcgggggctccctttagggttccgatttagtgctttacggcacctcgaccccaaaaaacttgattagggtgatggttcacgtagtgggccatcgccctgatagacggtttttcgccctttgacgttggagtccacgttctttaatagtggactcttgttccaaactggaacaacactcaaccctatctcggtctattcttttgatttataagggattttgccgatttcggcctattggttaaaaaatgagctgatttaacaaaaatttaacgcgaattttaacaaaatattaacgcttacaatttaggtggcacttttcggggaaatgtgcgcggaacccctatttgtttatttttctaaatacattcaaatatgtatccgctcatgagacaataaccctgataaatgcttcaataatattgaaaaaggaagagtatgagtattcaacatttccgtgtcgcccttattcccttttttgcggcattttgccttcctgtttttgctcacccagaaacgctggtgaaagtaaaagatgctgaagatcagttgggtgcacgagtgggttacatcgaactggatctcaacagcggtaagatccttgagagttttcgccccgaagaacgttttccaatgatgagcacttttaaagttctgctatgtggcgcggtattatcccgtattgacgccgggcaagagcaactcggtcgccgcatacactattctcagaatgacttggttgagtactcaccagtcacagaaaagcatcttacggatggcatgacagtaagagaattatgcagtgctgccataaccatgagtgataacactgcggccaacttacttctgacaacgatcggaggaccgaaggagctaaccgcttttttgcacaacatgggggatcatgtaactcgccttgatcgttgggaaccggagctgaatgaagccataccaaacgacgagcgtgacaccacgatgcctgtagcaatggcaacaacgttgcgcaaactattaactggcgaactacttactctagcttcccggcaacaattaatagactggatggaggcggataaagttgcaggaccacttctgcgctcggcccttccggctggctggtttattgctgataaatctggagccggtgagcgtgggtctcgcggtatcattgcagcactggggccagatggtaagccctcccgtatcgtagttatctacacgacggggagtcaggcaactatggatgaacgaaatagacagatcgctgagataggtgcctcactgattaagcattggtaactgtcagaccaagtttactcatatatactttagattgatttaaaacttcatttttaatttaaaaggatctaggtgaagatcctttttgataatctcatgaccaaaatcccttaacgtgagttttcgttccactgagcgtcagaccccgtagaaaagatcaaaggatcttcttgagatcctttttttctgcgcgtaatctgctgcttgcaaacaaaaaaaccaccgctaccagcggtggtttgtttgccggatcaagagctaccaactctttttccgaaggtaactggcttcagcagagcgcagataccaaatactgttcttctagtgtagccgtagttaggccaccacttcaagaactctgtagcaccgcctacatacctcgctctgctaatcctgttaccagtggctgctgccagtggcgataagtcgtgtcttaccgggttggactcaagacgatagttaccggataaggcgcagcggtcgggctgaacggggggttcgtgcacacagcccagcttggagcgaacgacctacaccgaactgagatacctacagcgtgagctatgagaaagcgccacgcttcccgaagggagaaaggcggacaggtatccggtaagcggcagggtcggaacaggagagcgcacgagggagcttccagggggaaacgcctggtatctttatagtcctgtcgggtttcgccacctctgacttgagcgtcgatttttgtgatgctcgtcaggggggcggagcctatggaaaaacgccagcaacgcggcctttttacggttcctggccttttgctggccttttgctcacatgttctttcctgcgttatcccctgattctgtggataaccgtattaccgcctttgagtgagctgataccgctcgccgcagccgaacgaccgagcgcagcgagtcagtgagcgaggaagcggaagagcgcccaatacgcaaaccgcctctccccgcgcgttggccgattcattaatgcagctggcacgacaggtttcccgactggaaagcgggcagtgagcgcaacgcaattaatgtgagttagctcactcattaggcaccccaggctttacactttatgcttccggctcgtatgttgtgtggaattgtgagcggataacaatttcacacaggaaacagctatgaccatgattacgccagatttaattaag

SEQ ID NO: 43 - DNA, 4910 bp, Artificial Sequence
  Description of Artificial Sequence: Synthetic polynucleotide
gccttaattaggctgcgcgctcgctcgctcactgaggccgcccgggcaaagcccgggcgtcgggcgacctttggtcgcccggcctcagtgagcgagcgagcgcgcagagagggagtggccaactccatcactaggggttccttgtagttaatgattaacccgccatgctacttatctaccagggtaatggggatcctctagaactataggttgacattgattattgactagttattaatagtaatcaattacggggtcattagttcatagcccatatatggagttccgcgttacataacttacggtaaatggcccgcctggctgaccgcccaacgacccccgcccattgacgtcaataatgacgtatgttcccatagtaacgccaatagggactttccattgacgtcaatgggtggagtatttacggtaaactgcccacttggcagtacatcaagtgtatcatatgccaagtacgccccctattgacgtcaatgacggtaaatggcccgcctggcattatgcccagtacatgaccttatgggactttcctacttggcagtacatctacgtattagtcatcgctattaccatggtgatgcggttttggcagtacatcaatgggcgtggatagcggtttgactcacggggatttccaagtctccaccccattgacgtcaatgggagtttgttttggcaccaaaatcaacgggactttccaaaatgtcgtaacaactccgccccattgacgcaaatgggcggtaggcgtgtacggtgggaggtctatataagcagagctctctggctaactagagaacccactgcttactggcttatcgaaattaatacgactcactatagggagacccaagctggctagcgtttaaacttcgggagcaagcttgaactgaaaaaccagaaagttaactggtaagtttagtctttttgtcttttatttcaggtcccggatccggtggtggtgcaaatcaaagaactgctcctcagtggatgttgcctttacttctaggcctgtacggaagtgttacttctgctctaaaagctgcggaattgtacccgcggccgatccaccggtatgtggactctgggtcgcagagcggtggcaggcttgctggcatctccgtccccggctcaggcccagaccctgacacgggtgcccaggccggccgagctggctcctctgtgcggccggcgcggccttagaacagacattgacgcaacctgcacccccagaagagccagttccaaccagcgcgggttgaatcagatctggaacgtcaagaagcagagtgtgtaccttatgaatctccggaaaagtggcaccctcggacaccccggatccctcgatgaaaccacttatgagcgcctggccgaggaaaccctggattccctggctgagttcttcgaggacctggctgacaaaccctacaccttcgaagactacgacgtttccttcggaagtggggtgctgacggtcaaacttggtggcgatcttggaacctatgttataaacaagcagactcccaacaaacagatctggctcagctctccaagttcaggacccaagaggtatgactggacgggcaagaattgggtctattctcacgacggagtgagccttcatgaactgttggctgccgaactgacaaaagcccttaagacgaaactggacctgtcctcattggcgtactctggtaaggatgcctaactcgaggacggggtgaactacgcctgaggatccgatctttttccctctgccaaaaattatggggacatcatgaagccccttgagcatctgacttctggctaataaaggaaatttattttcattgcaatagtgtgttggaattttttgtgtctctcactcggaagcaattcgttgatctgaatttcgaccacccataatacccattaccctggtagataagtagcatggcgggttaatcattaactacaaggaacccctagtgatggagttggccactccctctctgcgcgctcgctcgctcactgaggccgggcgaccaaaggtcgcccgacgcccgggctttgcccgggcggcctcagtgagcgagcgagcgcgcagccttaattaacctaattcactggccgtcgttttacaacgtcgtgactgggaaaaccctggcgttacccaacttaatcgccttgcagcacatccccctttcgccagctggcgtaatagcgaagaggcccgcaccgatcgcccttcccaacagttgcgcagcctgaatggcgaatgggacgcgccctgtagcggcgcattaagcgcggcgggtgtggtggttacgcgcagcgtgaccgctacacttgccagcgccctagcgcccgctcctttcgctttcttcccttcctttctcgccacgttcgccggctttccccgtcaagctctaaatcgggggctccctttagggttccgatttagtgctttacggcacctcgaccccaaaaaacttgattagggtgatggttcacgtagtgggccatcgccctgatagacggtttttcgccctttgacgttggagtccacgttctttaatagtggactcttgttccaaactggaacaacactcaaccctatctcggtctattcttttgatttataagggattttgccgatttcggcctattggttaaaaaatgagctgatttaacaaaaatttaacgcgaattttaacaaaatattaacgcttacaatttaggtggcacttttcggggaaatgtgcgcggaacccctatttgtttatttttctaaatacattcaaatatgtatccgctcatgagacaataaccctgataaatgcttcaataatattgaaaaaggaagagtatgagtattcaacatttccgtgtcgcccttattcccttttttgcggcattttgccttcctgtttttgctcacccagaaacgctggtgaaagtaaaagatgctgaagatcagttgggtgcacgagtgggttacatcgaactggatctcaacagcggtaagatccttgagagttttcgccccgaagaacgttttccaatgatgagcacttttaaagttctgctatgtggcgcggtattatcccgtattgacgccgggcaagagcaactcggtcgccgcatacactattctcagaatgacttggttgagtactcaccagtcacagaaaagcatcttacggatggcatgacagtaagagaattatgcagtgctgccataaccatgagtgataacactgcggccaacttacttctgacaacgatcggaggaccgaaggagctaaccgcttttttgcacaacatgggggatcatgtaactcgccttgatcgttgggaaccggagctgaatgaagccataccaaacgacgagcgtgacaccacgatgcctgtagcaatggcaacaacgttgcgcaaactattaactggcgaactacttactctagcttcccggcaacaattaatagactggatggaggcggataaagttgcaggaccacttctgcgctcggcccttccggctggctggtttattgctgataaatctggagccggtgagcgtgggtctcgcggtatcattgcagcactggggccagatggtaagccctcccgtatcgtagttatctacacgacggggagtcaggcaactatggatgaacgaaatagacagatcgctgagataggtgcctcactgattaagcattggtaactgtcagaccaagtttactcatatatactttagattgatttaaaacttcatttttaatttaaaaggatctaggtgaagatcctttttgataatctcatgaccaaaatcccttaacgtgagttttcgttccactgagcgtcagaccccgtagaaaagatcaaaggatcttcttgagatcctttttttctgcgcgtaatctgctgcttgcaaacaaaaaaaccaccgctaccagcggtggtttgtttgccggatcaagagctaccaactctttttccgaaggtaactggcttcagcagagcgcagataccaaatactgttcttctagtgtagccgtagttaggccaccacttcaagaactctgtagcaccgcctacatacctcgctctgctaatcctgttaccagtggctgctgccagtggcgataagtcgtgtcttaccgggttggactcaagacgatagttaccggataaggcgcagcggtcgggctgaacggggggttcgtgcacacagcccagcttggagcgaacgacctacaccgaactgagatacctacagcgtgagctatgagaaagcgccacgcttcccgaagggagaaaggcggacaggtatccggtaagcggcagggtcggaacaggagagcgcacgagggagcttccagggggaaacgcctggtatctttatagtcctgtcgggtttcgccacctctgacttgagcgtcgatttttgtgatgctcgtcaggggggcggagcctatggaaaaacgccagcaacgcggcctttttacggttcctggccttttgctggccttttgctcacatgttctttcctgcgttatcccctgattctgtggataaccgtattaccgcctttgagtgagctgataccgctcgccgcagccgaacgaccgagcgcagcgagtcagtgagcgaggaagcggaagagcgcccaatacgcaaaccgcctctccccgcgcgttggccgattcattaatgcagctggcacgacaggtttcccgactggaaagcgggcagtgagcgcaacgcaattaatgtgagttagctcactcattaggcaccccaggctttacactttatgcttccggctcgtatgttgtgtggaattgtgagcggataacaatttcacacaggaaacagctatgaccatgattacgccagatttaattaag

SEQ ID NO: 44 - DNA, 4910 bp, Artificial Sequence
  Description of Artificial Sequence: Synthetic polynucleotide
gccttaattaggctgcgcgctcgctcgctcactgaggccgcccgggcaaagcccgggcgtcgggcgacctttggtcgcccggcctcagtgagcgagcgagcgcgcagagagggagtggccaactccatcactaggggttccttgtagttaatgattaacccgccatgctacttatctaccagggtaatggggatcctctagaactataggttgacattgattattgactagttattaatagtaatcaattacggggtcattagttcatagcccatatatggagttccgcgttacataacttacggtaaatggcccgcctggctgaccgcccaacgacccccgcccattgacgtcaataatgacgtatgttcccatagtaacgccaatagggactttccattgacgtcaatgggtggagtatttacggtaaactgcccacttggcagtacatcaagtgtatcatatgccaagtacgccccctattgacgtcaatgacggtaaatggcccgcctggcattatgcccagtacatgaccttatgggactttcctacttggcagtacatctacgtattagtcatcgctattaccatggtgatgcggttttggcagtacatcaatgggcgtggatagcggtttgactcacggggatttccaagtctccaccccattgacgtcaatgggagtttgttttggcaccaaaatcaacgggactttccaaaatgtcgtaacaactccgccccattgacgcaaatgggcggtaggcgtgtacggtgggaggtctatataagcagagctctctggctaactagagaacccactgcttactggcttatcgaaattaatacgactcactatagggagacccaagctggctagcgtttaaacttcgggagcaagcttgaactgaaaaaccagaaagttaactggtaagtttagtctttttgtcttttatttcaggtcccggatccggtggtggtgcaaatcaaagaactgctcctcagtggatgttgcctttacttctaggcctgtacggaagtgttacttctgctctaaaagctgcggaattgtacccgcggccgatccaccggtatgtggactctggggaggcgcgccgttgccggactcctggcatctccaagcccagcgcaggctcaaaccctcacgcgcgttcccaggccagccgagttggcccccctttgtggcaggcgcggcctgaggacagatatcgacgccacatgcactcctcgccgcgcctccagcaatcaaaggggtttgaaccaaatttggaacgtcaagaagcaatcagtgtatctcatgaatctgagaaagagcggcacactcggtcatcccggaagtctggacgaaaccacatacgaacggctcgccgaggaaacgctggatagcctggccgagtttttcgaggacctggctgataaaccgtatactttcgaagattatgacgtgtcattcgggagcggcgtactgaccgtcaaattgggcggtgacctggggacatacgtgattaacaagcagactcctaataaacagatttggttgagctctccttccagcgggcctaaacgctatgattggacagggaagaattgggtttacagtcacgacggagttagccttcacgagctcttggcagcggagctgacaaaggcgctcaagaccaaactcgacctgtcttcactcgcctattcaggcaaagacgcctgactcgaggacggggtgaactacgcctgaggatccgatctttttccctctgccaaaaattatggggacatcatgaagccccttgagcatctgacttctggctaataaaggaaatttattttcattgcaatagtgtgttggaattttttgtgtctctcactcggaagcaattcgttgatctgaatttcgaccacccataatacccattaccctggtagataagtagcatggcgggttaatcattaactacaaggaacccctagtgatggagttggccactccctctctgcgcgctcgctcgctcactgaggccgggcgaccaaaggtcgcccgacgcccgggctttgcccgggcggcctcagtgagcgagcgagcgcgcagccttaattaacctaattcactggccgtcgttttacaacgtcgtgactgggaaaaccctggcgttacccaacttaatcgccttgcagcacatccccctttcgccagctggcgtaatagcgaagaggcccgcaccgatcgcccttcccaacagttgcgcagcctgaatggcgaatgggacgcgccctgtagcggcgcattaagcgcggcgggtgtggtggttacgcgcagcgtgaccgctacacttgccagcgccctagcgcccgctcctttcgctttcttcccttcctttctcgccacgttcgccggctttccccgtcaagctctaaatcgggggctccctttagggttccgatttagtgctttacggcacctcgaccccaaaaaacttgattagggtgatggttcacgtagtgggccatcgccctgatagacggtttttcgccctttgacgttggagtccacgttctttaatagtggactcttgttccaaactggaacaacactcaaccctatctcggtctattcttttgatttataagggattttgccgatttcggcctattggttaaaaaatgagctgatttaacaaaaatttaacgcgaattttaacaaaatattaacgcttacaatttaggtggcacttttcggggaaatgtgcgcggaacccctatttgtttatttttctaaatacattcaaatatgtatccgctcatgagacaataaccctgataaatgcttcaataatattgaaaaaggaagagtatgagtattcaacatttccgtgtcgcccttattcccttttttgcggcattttgccttcctgtttttgctcacccagaaacgctggtgaaagtaaaagatgctgaagatcagttgggtgcacgagtgggttacatcgaactggatctcaacagcggtaagatccttgagagttttcgccccgaagaacgttttccaatgatgagcacttttaaagttctgctatgtggcgcggtattatcccgtattgacgccgggcaagagcaactcggtcgccgcatacactattctcagaatgacttggttgagtactcaccagtcacagaaaagcatcttacggatggcatgacagtaagagaattatgcagtgctgccataaccatgagtgataacactgcggccaacttacttctgacaacgatcggaggaccgaaggagctaaccgcttttttgcacaacatgggggatcatgtaactcgccttgatcgttgggaaccggagctgaatgaagccataccaaacgacgagcgtgacaccacgatgcctgtagcaatggcaacaacgttgcgcaaactattaactggcgaactacttactctagcttcccggcaacaattaatagactggatggaggcggataaagttgcaggaccacttctgcgctcggcccttccggctggctggtttattgctgataaatctggagccggtgagcgtgggtctcgcggtatcattgcagcactggggccagatggtaagccctcccgtatcgtagttatctacacgacggggagtcaggcaactatggatgaacgaaatagacagatcgctgagataggtgcctcactgattaagcattggtaactgtcagaccaagtttactcatatatactttagattgatttaaaacttcatttttaatttaaaaggatctaggtgaagatcctttttgataatctcatgaccaaaatcccttaacgtgagttttcgttccactgagcgtcagaccccgtagaaaagatcaaaggatcttcttgagatcctttttttctgcgcgtaatctgctgcttgcaaacaaaaaaaccaccgctaccagcggtggtttgtttgccggatcaagagctaccaactctttttccgaaggtaactggcttcagcagagcgcagataccaaatactgttcttctagtgtagccgtagttaggccaccacttcaagaactctgtagcaccgcctacatacctcgctctgctaatcctgttaccagtggctgctgccagtggcgataagtcgtgtcttaccgggttggactcaagacgatagttaccggataaggcgcagcggtcgggctgaacggggggttcgtgcacacagcccagcttggagcgaacgacctacaccgaactgagatacctacagcgtgagctatgagaaagcgccacgcttcccgaagggagaaaggcggacaggtatccggtaagcggcagggtcggaacaggagagcgcacgagggagcttccagggggaaacgcctggtatctttatagtcctgtcgggtttcgccacctctgacttgagcgtcgatttttgtgatgctcgtcaggggggcggagcctatggaaaaacgccagcaacgcggcctttttacggttcctggccttttgctggccttttgctcacatgttctttcctgcgttatcccctgattctgtggataaccgtattaccgcctttgagtgagctgataccgctcgccgcagccgaacgaccgagcgcagcgagtcagtgagcgaggaagcggaagagcgcccaatacgcaaaccgcctctccccgcgcgttggccgattcattaatgcagctggcacgacaggtttcccgactggaaagcgggcagtgagcgcaacgcaattaatgtgagttagctcactcattaggcaccccaggctttacactttatgcttccggctcgtatgttgtgtggaattgtgagcggataacaatttcacacaggaaacagctatgaccatgattacgccagatttaattaag

SEQ ID NO: 45 - DNA, 4910 bp, Artificial Sequence
  Description of Artificial Sequence: Synthetic polynucleotide
gccttaattaggctgcgcgctcgctcgctcactgaggccgcccgggcaaagcccgggcgtcgggcgacctttggtcgcccggcctcagtgagcgagcgagcgcgcagagagggagtggccaactccatcactaggggttccttgtagttaatgattaacccgccatgctacttatctaccagggtaatggggatcctctagaactataggttgacattgattattgactagttattaatagtaatcaattacggggtcattagttcatagcccatatatggagttccgcgttacataacttacggtaaatggcccgcctggctgaccgcccaacgacccccgcccattgacgtcaataatgacgtatgttcccatagtaacgccaatagggactttccattgacgtcaatgggtggagtatttacggtaaactgcccacttggcagtacatcaagtgtatcatatgccaagtacgccccctattgacgtcaatgacggtaaatggcccgcctggcattatgcccagtacatgaccttatgggactttcctacttggcagtacatctacgtattagtcatcgctattaccatggtgatgcggttttggcagtacatcaatgggcgtggatagcggtttgactcacggggatttccaagtctccaccccattgacgtcaatgggagtttgttttggcaccaaaatcaacgggactttccaaaatgtcgtaacaactccgccccattgacgcaaatgggcggtaggcgtgtacggtgggaggtctatataagcagagctctctggctaactagagaacccactgcttactggcttatcgaaattaatacgactcactatagggagacccaagctggctagcgtttaaacttcgggagcaagcttgaactgaaaaaccagaaagttaactggtaagtttagtctttttgtcttttatttcaggtcccggatccggtggtggtgcaaatcaaagaactgctcctcagtggatgttgcctttacttctaggcctgtacggaagtgttacttctgctctaaaagctgcggaattgtacccgcggccgatccaccggtatgtggacactcgggcgacgcgccgtggctgggctgcttgcttccccaagtcccgcacaggcgcaaaccctcacaagggtcccacggccagctgaattggccccgctgtgcggtcggaggggcctgcgaacagatatagacgcaacgtgcacccccagaagagcaagcagcaaccagagaggcctcaatcagatttggaacgtcaagaaacagagtgtctatctgatgaacctccgcaaatcagggacccttggtcatccgggatctcttgatgaaacgacctatgaacggctggctgaggagacgcttgactccctggcagagttcttcgaggatctggctgataagccatacacgttcgaggactatgatgtttcttttggttctggcgtcctgacggtgaaactcggaggggatctgggcacttacgttatcaacaaacagactcccaataaacagatttggttgtctagtcctagcagtggcccaaaacgctatgactggacgggcaagaactgggtgtactcccacgatggagttagcctgcacgaacttctggccgctgagcttactaaagcgctgaagactaagctggatctctccagcctcgcatacagcggcaaagacgcctagctcgaggacggggtgaactacgcctgaggatccgatctttttccctctgccaaaaattatggggacatcatgaagccccttgagcatctgacttctggctaataaaggaaatttattttcattgcaatagtgtgttggaattttttgtgtctctcactcggaagcaattcgttgatctgaatttcgaccacccataatacccattaccctggtagataagtagcatggcgggttaatcattaactacaaggaacccctagtgatggagttggccactccctctctgcgcgctcgctcgctcactgaggccgggcgaccaaaggtcgcccgacgcccgggctttgcccgggcggcctcagtgagcgagcgagcgcgcagccttaattaacctaattcactggccgtcgttttacaacgtcgtgactgggaaaaccctggcgttacccaacttaatcgccttgcagcacatccccctttcgccagctggcgtaatagcgaagaggcccgcaccgatcgcccttcccaacagttgcgcagcctgaatggcgaatgggacgcgccctgtagcggcgcattaagcgcggcgggtgtggtggttacgcgcagcgtgaccgctacacttgccagcgccctagcgcccgctcctttcgctttcttcccttcctttctcgccacgttcgccggctttccccgtcaagctctaaatcgggggctccctttagggttccgatttagtgctttacggcacctcgaccccaaaaaacttgattagggtgatggttcacgtagtgggccatcgccctgatagacggtttttcgccctttgacgttggagtccacgttctttaatagtggactcttgttccaaactggaacaacactcaaccctatctcggtctattcttttgatttataagggattttgccgatttcggcctattggttaaaaaatgagctgatttaacaaaaatttaacgcgaattttaacaaaatattaacgcttacaatttaggtggcacttttcggggaaatgtgcgcggaacccctatttgtttatttttctaaatacattcaaatatgtatccgctcatgagacaataaccctgataaatgcttcaataatattgaaaaaggaagagtatgagtattcaacatttccgtgtcgcccttattcccttttttgcggcattttgccttcctgtttttgctcacccagaaacgctggtgaaagtaaaagatgctgaagatcagttgggtgcacgagtgggttacatcgaactggatctcaacagcggtaagatccttgagagttttcgccccgaagaacgttttccaatgatgagcacttttaaagttctgctatgtggcgcggtattatcccgtattgacgccgggcaagagcaactcggtcgccgcatacactattctcagaatgacttggttgagtactcaccagtcacagaaaagcatcttacggatggcatgacagtaagagaattatgcagtgctgccataaccatgagtgataacactgcggccaacttacttctgacaacgatcggaggaccgaaggagctaaccgcttttttgcacaacatgggggatcatgtaactcgccttgatcgttgggaaccggagctgaatgaagccataccaaacgacgagcgtgacaccacgatgcctgtagcaatggcaacaacgttgcgcaaactattaactggcgaactacttactctagcttcccggcaacaattaatagactggatggaggcggataaagttgcaggaccacttctgcgctcggcccttccggctggctggtttattgctgataaatctggagccggtgagcgtgggtctcgcggtatcattgcagcactggggccagatggtaagccctcccgtatcgtagttatctacacgacggggagtcaggcaactatggatgaacgaaatagacagatcgctgagataggtgcctcactgattaagcattggtaactgtcagaccaagtttactcatatatactttagattgatttaaaacttcatttttaatttaaaaggatctaggtgaagatcctttttgataatctcatgaccaaaatcccttaacgtgagttttcgttccactgagcgtcagaccccgtagaaaagatcaaaggatcttcttgagatcctttttttctgcgcgtaatctgctgcttgcaaacaaaaaaaccaccgctaccagcggtggtttgtttgccggatcaagagctaccaactctttttccgaaggtaactggcttcagcagagcgcagataccaaatactgttcttctagtgtagccgtagttaggccaccacttcaagaactctgtagcaccgcctacatacctcgctctgctaatcctgttaccagtggctgctgccagtggcgataagtcgtgtcttaccgggttggactcaagacgatagttaccggataaggcgcagcggtcgggctgaacggggggttcgtgcacacagcccagcttggagcgaacgacctacaccgaactgagatacctacagcgtgagctatgagaaagcgccacgcttcccgaagggagaaaggcggacaggtatccggtaagcggcagggtcggaacaggagagcgcacgagggagcttccagggggaaacgcctggtatctttatagtcctgtcgggtttcgccacctctgacttgagcgtcgatttttgtgatgctcgtcaggggggcggagcctatggaaaaacgccagcaacgcggcctttttacggttcctggccttttgctggccttttgctcacatgttctttcctgcgttatcccctgattctgtggataaccgtattaccgcctttgagtgagctgataccgctcgccgcagccgaacgaccgagcgcagcgagtcagtgagcgaggaagcggaagagcgcccaatacgcaaaccgcctctccccgcgcgttggccgattcattaatgcagctggcacgacaggtttcccgactggaaagcgggcagtgagcgcaacgcaattaatgtgagttagctcactcattaggcaccccaggctttacactttatgcttccggctcgtatgttgtgtggaattgtgagcggataacaatttcacacaggaaacagctatgaccatgattacgccagatttaattaag

SEQ ID NO: 46 - DNA, 4910 bp, Artificial Sequence
  Description of Artificial Sequence: Synthetic polynucleotide
gccttaattaggctgcgcgctcgctcgctcactgaggccgcccgggcaaagcccgggcgtcgggcgacctttggtcgcccggcctcagtgagcgagcgagcgcgcagagagggagtggccaactccatcactaggggttccttgtagttaatgattaacccgccatgctacttatctaccagggtaatggggatcctctagaactataggttgacattgattattgactagttattaatagtaatcaattacggggtcattagttcatagcccatatatggagttccgcgttacataacttacggtaaatggcccgcctggctgaccgcccaacgacccccgcccattgacgtcaataatgacgtatgttcccatagtaacgccaatagggactttccattgacgtcaatgggtggagtatttacggtaaactgcccacttggcagtacatcaagtgtatcatatgccaagtacgccccctattgacgtcaatgacggtaaatggcccgcctggcattatgcccagtacatgaccttatgggactttcctacttggcagtacatctacgtattagtcatcgctattaccatggtgatgcggttttggcagtacatcaatgggcgtggatagcggtttgactcacggggatttccaagtctccaccccattgacgtcaatgggagtttgttttggcaccaaaatcaacgggactttccaaaatgtcgtaacaactccgccccattgacgcaaatgggcggtaggcgtgtacggtgggaggtctatataagcagagctctctggctaactagagaacccactgcttactggcttatcgaaattaatacgactcactatagggagacccaagctggctagcgtttaaacttcgggagcaagcttgaactgaaaaaccagaaagttaactggtaagtttagtctttttgtcttttatttcaggtcccggatccggtggtggtgcaaatcaaagaactgctcctcagtggatgttgcctttacttctaggcctgtacggaagtgttacttctgctctaaaagctgcggaattgtacccgcggccgatccaccggtatgtggactctgggtcgacgcgccgtagccggtctcttggcctccccatcccctgcgcaggcacagacccttacacgagttccacggcccgctgaactggcaccactctgcggacgccggggcctgagaaccgatattgacgctacgtgcactccccgacgagcctcttctaatcagagggggctcaaccagatctggaacgtgaagaagcagtcagtctacttgatgaatctgagaaagagcgggacccttgggcaccccgggtctctcgacgagactacatacgagaggctggccgaggagactttggactctctcgccgaattcttcgaggatttggcagacaagccgtacacctttgaagactacgatgtctcattcggatcaggggtgctgacggttaaactggggggcgatctcggaacctacgtcataaacaaacagacacccaataagcagatctggttgtctagcccatcatccggtcctaaacggtacgactggaccggcaagaactgggtctactcccatgacggagtcagtcttcatgaactgcttgccgcagagctgaccaaggctcttaagacgaaactggatctctctagcctggcctactccgggaaggatgcatagctcgaggacggggtgaactacgcctgaggatccgatctttttccctctgccaaaaattatggggacatcatgaagccccttgagcatctgacttctggctaataaaggaaatttattttcattgcaatagtgtgttggaattttttgtgtctctcactcggaagcaattcgttgatctgaatttcgaccacccataatacccattaccctggtagataagtagcatggcgggttaatcattaactacaaggaacccctagtgatggagttggccactccctctctgcgcgctcgctcgctcactgaggccgggcgaccaaaggtcgcccgacgcccgggctttgcccgggcggcctcagtgagcgagcgagcgcgcagccttaattaacctaattcactggccgtcgttttacaacgtcgtgactgggaaaaccctggcgttacccaacttaatcgccttgcagcacatccccctttcgccagctggcgtaatagcgaagaggcccgcaccgatcgcccttcccaacagttgcgcagcctgaatggcgaatgggacgcgccctgtagcggcgcattaagcgcggcgggtgtggtggttacgcgcagcgtgaccgctacacttgccagcgccctagcgcccgctcctttcgctttcttcccttcctttctcgccacgttcgccggctttccccgtcaagctctaaatcgggggctccctttagggttccgatttagtgctttacggcacctcgaccccaaaaaacttgattagggtgatggttcacgtagtgggccatcgccctgatagacggtttttcgccctttgacgttggagtccacgttctttaatagtggactcttgttccaaactggaacaacactcaaccctatctcggtctattcttttgatttataagggattttgccgatttcggcctattggttaaaaaatgagctgatttaacaaaaatttaacgcgaattttaacaaaatattaacgcttacaatttaggtggcacttttcggggaaatgtgcgcggaacccctatttgtttatttttctaaatacattcaaatatgtatccgctcatgagacaataaccctgataaatgcttcaataatattgaaaaaggaagagtatgagtattcaacatttccgtgtcgcccttattcccttttttgcggcattttgccttcctgtttttgctcacccagaaacgctggtgaaagtaaaagatgctgaagatcagttgggtgcacgagtgggttacatcgaactggatctcaacagcggtaagatccttgagagttttcgccccgaagaacgttttccaatgatgagcacttttaaagttctgctatgtggcgcggtattatcccgtattgacgccgggcaagagcaactcggtcgccgcatacactattctcagaatgacttggttgagtactcaccagtcacagaaaagcatcttacggatggcatgacagtaagagaattatgcagtgctgccataaccatgagtgataacactgcggccaacttacttctgacaacgatcggaggaccgaaggagctaaccgcttttttgcacaacatgggggatcatgtaactcgccttgatcgttgggaaccggagctgaatgaagccataccaaacgacgagcgtgacaccacgatgcctgtagcaatggcaacaacgttgcgcaaactattaactggcgaactacttactctagcttcccggcaacaattaatagactggatggaggcggataaagttgcaggaccacttctgcgctcggcccttccggctggctggtttattgctgataaatctggagccggtgagcgtgggtctcgcggtatcattgcagcactggggccagatggtaagccctcccgtatcgtagttatctacacgacggggagtcaggcaactatggatgaacgaaatagacagatcgctgagataggtgcctcactgattaagcattggtaactgtcagaccaagtttactcatatatactttagattgatttaaaacttcatttttaatttaaaaggatctaggtgaagatcctttttgataatctcatgaccaaaatcccttaacgtgagttttcgttccactgagcgtcagaccccgtagaaaagatcaaaggatcttcttgagatcctttttttctgcgcgtaatctgctgcttgcaaacaaaaaaaccaccgctaccagcggtggtttgtttgccggatcaagagctaccaactctttttccgaaggtaactggcttcagcagagcgcagataccaaatactgttcttctagtgtagccgtagttaggccaccacttcaagaactctgtagcaccgcctacatacctcgctctgctaatcctgttaccagtggctgctgccagtggcgataagtcgtgtcttaccgggttggactcaagacgatagttaccggataaggcgcagcggtcgggctgaacggggggttcgtgcacacagcccagcttggagcgaacgacctacaccgaactgagatacctacagcgtgagctatgagaaagcgccacgcttcccgaagggagaaaggcggacaggtatccggtaagcggcagggtcggaacaggagagcgcacgagggagcttccagggggaaacgcctggtatctttatagtcctgtcgggtttcgccacctctgacttgagcgtcgatttttgtgatgctcgtcaggggggcggagcctatggaaaaacgccagcaacgcggcctttttacggttcctggccttttgctggccttttgctcacatgttctttcctgcgttatcccctgattctgtggataaccgtattaccgcctttgagtgagctgataccgctcgccgcagccgaacgaccgagcgcagcgagtcagtgagcgaggaagcggaagagcgcccaatacgcaaaccgcctctccccgcgcgttggccgattcattaatgcagctggcacgacaggtttcccgactggaaagcgggcagtgagcgcaacgcaattaatgtgagttagctcactcattaggcaccccaggctttacactttatgcttccggctcgtatgttgtgtggaattgtgagcggataacaatttcacacaggaaacagctatgaccatgattacgccagatttaattaag

SEQ ID NO: 47 - DNA, 4919 bp, Artificial Sequence
  Description of Artificial Sequence: Synthetic polynucleotide
gccttaattaggctgcgcgctcgctcgctcactgaggccgcccgggcaaagcccgggcgtcgggcgacctttggtcgcccggcctcagtgagcgagcgagcgcgcagagagggagtggccaactccatcactaggggttccttgtagttaatgattaacccgccatgctacttatctaccagggtaatggggatcctctagaactataggttgacattgattattgactagttattaatagtaatcaattacggggtcattagttcatagcccatatatggagttccgcgttacataacttacggtaaatggcccgcctggctgaccgcccaacgacccccgcccattgacgtcaataatgacgtatgttcccatagtaacgccaatagggactttccattgacgtcaatgggtggagtatttacggtaaactgcccacttggcagtacatcaagtgtatcatatgccaagtacgccccctattgacgtcaatgacggtaaatggcccgcctggcattatgcccagtacatgaccttatgggactttcctacttggcagtacatctacgtattagtcatcgctattaccatggtgatgcggttttggcagtacatcaatgggcgtggatagcggtttgactcacggggatttccaagtctccaccccattgacgtcaatgggagtttgttttggcaccaaaatcaacgggactttccaaaatgtcgtaacaactccgccccattgacgcaaatgggcggtaggcgtgtacggtgggaggtctatataagcagagctctctggctaactagagaacccactgcttactggcttatcgaaattaatacgactcactatagggagacccaagctggctagcgtttaaacttcgggagcaagcttgaactgaaaaaccagaaagttaactggtaagtttagtctttttgtcttttatttcaggtcccggatccggtggtggtgcaaatcaaagaactgctcctcagtggatgttgcctttacttctaggcctgtacggaagtgttacttctgctctaaaagctgcggaattgtacccgcggccgatccaccggtgccgccaccatgtggactctcgggcgccgcgcagtagccggcctcctggcgtcacccagcccagcccaggcccagaccctcacccgggtcccgcggccggcagagttggccccactctgcggccgccgtggcctgcgcaccgacatcgatgcgacctgcacgccccgccgcgcaagttcgaaccaacgtggcctcaaccagatttggaatgtcaaaaagcagagtgtctatttgatgaatttgaggaaatctggaactttgggccacccaggctctctagatgagaccacctatgaaagactagcagaggaaacgctggactctttagcagagttttttgaagaccttgcagacaagccatacacgtttgaggactatgatgtctcctttgggagtggtgtcttaactgtcaaactgggtggagatctaggaacctatgtgatcaacaagcagacgccaaacaagcaaatctggctatcttctccatccagtggacctaagcgttatgactggactgggaaaaactgggtgtactcccacgacggcgtgtccctccatgagctgctggccgcagagctcactaaagccttaaaaaccaaactggacttgtcttccttggcctattccggaaaagatgcttgactcgaggacggggtgaactacgcctgaggatccgatctttttccctctgccaaaaattatggggacatcatgaagccccttgagcatctgacttctggctaataaaggaaatttattttcattgcaatagtgtgttggaattttttgtgtctctcactcggaagcaattcgttgatctgaatttcgaccacccataatacccattaccctggtagataagtagcatggcgggttaatcattaactacaaggaacccctagtgatggagttggccactccctctctgcgcgctcgctcgctcactgaggccgggcgaccaaaggtcgcccgacgcccgggctttgcccgggcggcctcagtgagcgagcgagcgcgcagccttaattaacctaattcactggccgtcgttttacaacgtcgtgactgggaaaaccctggcgttacccaacttaatcgccttgcagcacatccccctttcgccagctggcgtaatagcgaagaggcccgcaccgatcgcccttcccaacagttgcgcagcctgaatggcgaatgggacgcgccctgtagcggcgcattaagcgcggcgggtgtggtggttacgcgcagcgtgaccgctacacttgccagcgccctagcgcccgctcctttcgctttcttcccttcctttctcgccacgttcgccggctttccccgtcaagctctaaatcgggggctccctttagggttccgatttagtgctttacggcacctcgaccccaaaaaacttgattagggtgatggttcacgtagtgggccatcgccctgatagacggtttttcgccctttgacgttggagtccacgttctttaatagtggactcttgttccaaactggaacaacactcaaccctatctcggtctattcttttgatttataagggattttgccgatttcggcctattggttaaaaaatgagctgatttaacaaaaatttaacgcgaattttaacaaaatattaacgcttacaatttaggtggcacttttcggggaaatgtgcgcggaacccctatttgtttatttttctaaatacattcaaatatgtatccgctcatgagacaataaccctgataaatgcttcaataatattgaaaaaggaagagtatgagtattcaacatttccgtgtcgcccttattcccttttttgcggcattttgccttcctgtttttgctcacccagaaacgctggtgaaagtaaaagatgctgaagatcagttgggtgcacgagtgggttacatcgaactggatctcaacagcggtaagatccttgagagttttcgccccgaagaacgttttccaatgatgagcacttttaaagttctgctatgtggcgcggtattatcccgtattgacgccgggcaagagcaactcggtcgccgcatacactattctcagaatgacttggttgagtactcaccagtcacagaaaagcatcttacggatggcatgacagtaagagaattatgcagtgctgccataaccatgagtgataacactgcggccaacttacttctgacaacgatcggaggaccgaaggagctaaccgcttttttgcacaacatgggggatcatgtaactcgccttgatcgttgggaaccggagctgaatgaagccataccaaacgacgagcgtgacaccacgatgcctgtagcaatggcaacaacgttgcgcaaactattaactggcgaactacttactctagcttcccggcaacaattaatagactggatggaggcggataaagttgcaggaccacttctgcgctcggcccttccggctggctggtttattgctgataaatctggagccggtgagcgtgggtctcgcggtatcattgcagcactggggccagatggtaagccctcccgtatcgtagttatctacacgacggggagtcaggcaactatggatgaacgaaatagacagatcgctgagataggtgcctcactgattaagcattggtaactgtcagaccaagtttactcatatatactttagattgatttaaaacttcatttttaatttaaaaggatctaggtgaagatcctttttgataatctcatgaccaaaatcccttaacgtgagttttcgttccactgagcgtcagaccccgtagaaaagatcaaaggatcttcttgagatcctttttttctgcgcgtaatctgctgcttgcaaacaaaaaaaccaccgctaccagcggtggtttgtttgccggatcaagagctaccaactctttttccgaaggtaactggcttcagcagagcgcagataccaaatactgttcttctagtgtagccgtagttaggccaccacttcaagaactctgtagcaccgcctacatacctcgctctgctaatcctgttaccagtggctgctgccagtggcgataagtcgtgtcttaccgggttggactcaagacgatagttaccggataaggcgcagcggtcgggctgaacggggggttcgtgcacacagcccagcttggagcgaacgacctacaccgaactgagatacctacagcgtgagctatgagaaagcgccacgcttcccgaagggagaaaggcggacaggtatccggtaagcggcagggtcggaacaggagagcgcacgagggagcttccagggggaaacgcctggtatctttatagtcctgtcgggtttcgccacctctgacttgagcgtcgatttttgtgatgctcgtcaggggggcggagcctatggaaaaacgccagcaacgcggcctttttacggttcctggccttttgctggccttttgctcacatgttctttcctgcgttatcccctgattctgtggataaccgtattaccgcctttgagtgagctgataccgctcgccgcagccgaacgaccgagcgcagcgagtcagtgagcgaggaagcggaagagcgcccaatacgcaaaccgcctctccccgcgcgttggccgattcattaatgcagctggcacgacaggtttcccgactggaaagcgggcagtgagcgcaacgcaattaatgtgagttagctcactcattaggcaccccaggctttacactttatgcttccggctcgtatgttgtgtggaattgtgagcggataacaatttcacacaggaaacagctatgaccatgattacgccagatttaattaag

SEQ ID NO: 48 - DNA, 5586 bp, Artificial Sequence
  Description of Artificial Sequence: Synthetic polynucleotide
gccttaattaggctgcgcgctcgctcgctcactgaggccgcccgggcaaagcccgggcgtcgggcgacctttggtcgcccggcctcagtgagcgagcgagcgcgcagagagggagtggccaactccatcactaggggttccttgtagttaatgattaacccgccatgctacttatctaccagggtaatggggatcctctagaactatagctagtcgacgagctcccaggctcaagtgatcctcccgcctcagcctcctgagtagctgagatcacaggcatgcactaccacactcggctcacatttgacatcctctaaagcatatataaaatgtgaagaaaactttcacaatttgcatccctttgtaatatgtaacagaaataaaattctcttttaaaatctatcaacaataggcaaggcacggtggctcacgcctgtcgtctcagcactttgtgaggcccaggcgggcagatcgtttgagcctagaagttcaagaccaccctgggcaacatagcgaaaccccctttctacaaaaaatacaaaaactagctgggtgtggtggtgcacacctgtagtcccagctacttggaaggctgaaatgggaagactgcttgagcccgggagggagaagttgcagtaagccaggaccacaccactgcactccagcctgggcaacagagtgagactctgtctcaaacaaacaaataaatgaggcgggtggatcacgaggtcagtagatcgagaccatcctggctaacacggtgaaacccgtctctactaaaaaaaaaaaaaaatacaaaaaattagccaggcatggtggcgggcgcctgtagtcccagttactcgggaggctgaggcaggagaatggcgtgaaaccgggaggcagagcttgcagtgagccgagatcgcaccactgccctccagcctgggcgacagagcgagactccgtctcaatcaatcaatcaatcaataaaatctattaacaatatttattgtgcacttaacaggaacatgccctgtccaaaaaaaactttacagggcttaactcattttatccttaccacaatcctatgaagtaggaacttttataaaacgcattttataaacaaggcacagagaggttaattaacttgccctctggtcacacagctaggaagtgggcagagtacagatttacacaaggcatccgtctcctggccccacatacccaactgctgtaaacccataccggcggccaagcagcctcaatttgtgcatgcacccacttcccagcaagacagcagctcccaagttcctcctgtttagaattttagaagcggcgggccaccaggctgcagtctcccttgggtcaggggtcctggttgcactccgtgctttgcacaaagcaggctctccatttttgttaaatgcacgaatagtgctaagctgggaagttcttcctgaggtctaacctctagctgctcccccacagaagagtgcctgcggccagtggccaccaggggtcgccgcagcacccagcgctggagggcggagcgggcggcagacccggagcagcaagtggactctctcgagaagcttgaactgaaaaaccagaaagttaactggtaagtttagtctttttgtcttttatttcaggtcccggatccggtggtggtgcaaatcaaagaactgctcctcagtggatgttgcctttacttctaggcctgtacggaagtgttacttctgctctaaaagctgcggaattgtacccgcggccgatccaccggtatgtggactctcgggcgccgcgcagtagccggcctcctggcgtcacccagcccagcccaggcccagaccctcacccgggtcccgcggccggcagagttggccccactctgcggccgccgtggcctgcgcaccgacatcgatgcgacctgcacgccccgccgcgcaagttcgaaccaacgtggcctcaaccagatttggaatgtcaaaaagcagagtgtctatttgatgaatttgaggaaatctggaactttgggccacccaggctctctagatgagaccacctatgaaagactagcagaggaaacgctggactctttagcagagttttttgaagaccttgcagacaagccatacacgtttgaggactatgatgtctcctttgggagtggtgtcttaactgtcaaactgggtggagatctaggaacctatgtgatcaacaagcagacgccaaacaagcaaatctggctatcttctccatccagtggacctaagcgttatgactggactgggaaaaactgggtgtactcccacgacggcgtgtccctccatgagctgctggccgcagagctcactaaagccttaaaaaccaaactggacttgtcttccttggcctattccggaaaagatgcttgactcgaggacggggtgaactacgcctgaggatccgatctttttccctctgccaaaaattatggggacatcatgaagccccttgagcatctgacttctggctaataaaggaaatttattttcattgcaatagtgtgttggaattttttgtgtctctcactcggaagcaattcgttgatctgaatttcgaccacccataatacccattaccctggtagataagtagcatggcgggttaatcattaactacaaggaacccctagtgatggagttggccactccctctctgcgcgctcgctcgctcactgaggccgggcgaccaaaggtcgcccgacgcccgggctttgcccgggcggcctcagtgagcgagcgagcgcgcagccttaattaacctaattcactggccgtcgttttacaacgtcgtgactgggaaaaccctggcgttacccaacttaatcgccttgcagcacatccccctttcgccagctggcgtaatagcgaagaggcccgcaccgatcgcccttcccaacagttgcgcagcctgaatggcgaatgggacgcgccctgtagcggcgcattaagcgcggcgggtgtggtggttacgcgcagcgtgaccgctacacttgccagcgccctagcgcccgctcctttcgctttcttcccttcctttctcgccacgttcgccggctttccccgtcaagctctaaatcgggggctccctttagggttccgatttagtgctttacggcacctcgaccccaaaaaacttgattagggtgatggttcacgtagtgggccatcgccctgatagacggtttttcgccctttgacgttggagtccacgttctttaatagtggactcttgttccaaactggaacaacactcaaccctatctcggtctattcttttgatttataagggattttgccgatttcggcctattggttaaaaaatgagctgatttaacaaaaatttaacgcgaattttaacaaaatattaacgcttacaatttaggtggcacttttcggggaaatgtgcgcggaacccctatttgtttatttttctaaatacattcaaatatgtatccgctcatgagacaataaccctgataaatgcttcaataatattgaaaaaggaagagtatgagtattcaacatttccgtgtcgcccttattcccttttttgcggcattttgccttcctgtttttgctcacccagaaacgctggtgaaagtaaaagatgctgaagatcagttgggtgcacgagtgggttacatcgaactggatctcaacagcggtaagatccttgagagttttcgccccgaagaacgttttccaatgatgagcacttttaaagttctgctatgtggcgcggtattatcccgtattgacgccgggcaagagcaactcggtcgccgcatacactattctcagaatgacttggttgagtactcaccagtcacagaaaagcatcttacggatggcatgacagtaagagaattatgcagtgctgccataaccatgagtgataacactgcggccaacttacttctgacaacgatcggaggaccgaaggagctaaccgcttttttgcacaacatgggggatcatgtaactcgccttgatcgttgggaaccggagctgaatgaagccataccaaacgacgagcgtgacaccacgatgcctgtagcaatggcaacaacgttgcgcaaactattaactggcgaactacttactctagcttcccggcaacaattaatagactggatggaggcggataaagttgcaggaccacttctgcgctcggcccttccggctggctggtttattgctgataaatctggagccggtgagcgtgggtctcgcggtatcattgcagcactggggccagatggtaagccctcccgtatcgtagttatctacacgacggggagtcaggcaactatggatgaacgaaatagacagatcgctgagataggtgcctcactgattaagcattggtaactgtcagaccaagtttactcatatatactttagattgatttaaaacttcatttttaatttaaaaggatctaggtgaagatcctttttgataatctcatgaccaaaatcccttaacgtgagttttcgttccactgagcgtcagaccccgtagaaaagatcaaaggatcttcttgagatcctttttttctgcgcgtaatctgctgcttgcaaacaaaaaaaccaccgctaccagcggtggtttgtttgccggatcaagagctaccaactctttttccgaaggtaactggcttcagcagagcgcagataccaaatactgttcttctagtgtagccgtagttaggccaccacttcaagaactctgtagcaccgcctacatacctcgctctgctaatcctgttaccagtggctgctgccagtggcgataagtcgtgtcttaccgggttggactcaagacgatagttaccggataaggcgcagcggtcgggctgaacggggggttcgtgcacacagcccagcttggagcgaacgacctacaccgaactgagatacctacagcgtgagctatgagaaagcgccacgcttcccgaagggagaaaggcggacaggtatccggtaagcggcagggtcggaacaggagagcgcacgagggagcttccagggggaaacgcctggtatctttatagtcctgtcgggtttcgccacctctgacttgagcgtcgatttttgtgatgctcgtcaggggggcggagcctatggaaaaacgccagcaacgcggcctttttacggttcctggccttttgctggccttttgctcacatgttctttcctgcgttatcccctgattctgtggataaccgtattaccgcctttgagtgagctgataccgctcgccgcagccgaacgaccgagcgcagcgagtcagtgagcgaggaagcggaagagcgcccaatacgcaaaccgcctctccccgcgcgttggccgattcattaatgcagctggcacgacaggtttcccgactggaaagcgggcagtgagcgcaacgcaattaatgtgagttagctcactcattaggcaccccaggctttacactttatgcttccggctcgtatgttgtgtggaattgtgagcggataacaatttcacacaggaaacagctatgaccatgattacgccagatttaattaag

SEQ ID NO: 49 - DNA, 5586 bp, Artificial Sequence
  Description of Artificial Sequence: Synthetic polynucleotide
gccttaattaggctgcgcgctcgctcgctcactgaggccgcccgggcaaagcccgggcgtcgggcgacctttggtcgcccggcctcagtgagcgagcgagcgcgcagagagggagtggccaactccatcactaggggttccttgtagttaatgattaacccgccatgctacttatctaccagggtaatggggatcctctagaactatagctagtcgacgagctcccaggctcaagtgatcctcccgcctcagcctcctgagtagctgagatcacaggcatgcactaccacactcggctcacatttgacatcctctaaagcatatataaaatgtgaagaaaactttcacaatttgcatccctttgtaatatgtaacagaaataaaattctcttttaaaatctatcaacaataggcaaggcacggtggctcacgcctgtcgtctcagcactttgtgaggcccaggcgggcagatcgtttgagcctagaagttcaagaccaccctgggcaacatagcgaaaccccctttctacaaaaaatacaaaaactagctgggtgtggtggtgcacacctgtagtcccagctacttggaaggctgaaatgggaagactgcttgagcccgggagggagaagttgcagtaagccaggaccacaccactgcactccagcctgggcaacagagtgagactctgtctcaaacaaacaaataaatgaggcgggtggatcacgaggtcagtagatcgagaccatcctggctaacacggtgaaacccgtctctactaaaaaaaaaaaaaaatacaaaaaattagccaggcatggtggcgggcgcctgtagtcccagttactcgggaggctgaggcaggagaatggcgtgaaaccgggaggcagagcttgcagtgagccgagatcgcaccactgccctccagcctgggcgacagagcgagactccgtctcaatcaatcaatcaatcaataaaatctattaacaatatttattgtgcacttaacaggaacatgccctgtccaaaaaaaactttacagggcttaactcattttatccttaccacaatcctatgaagtaggaacttttataaaacgcattttataaacaaggcacagagaggttaattaacttgccctctggtcacacagctaggaagtgggcagagtacagatttacacaaggcatccgtctcctggccccacatacccaactgctgtaaacccataccggcggccaagcagcctcaatttgtgcatgcacccacttcccagcaagacagcagctcccaagttcctcctgtttagaattttagaagcggcgggccaccaggctgcagtctcccttgggtcaggggtcctggttgcactccgtgctttgcacaaagcaggctctccatttttgttaaatgcacgaatagtgctaagctgggaagttcttcctgaggtctaacctctagctgctcccccacagaagagtgcctgcggccagtggccaccaggggtcgccgcagcacccagcgctggagggcggagcgggcggcagacccggagcagcaagtggactctctcgagaagcttgaactgaaaaaccagaaagttaactggtaagtttagtctttttgtcttttatttcaggtcccggatccggtggtggtgcaaatcaaagaactgctcctcagtggatgttgcctttacttctaggcctgtacggaagtgttacttctgctctaaaagctgcggaattgtacccgcggccgatccaccggtatgtggactctgggtcgcagagcggtggcaggcttgctggcatctccgtccccggctcaggcccagaccctgacacgggtgcccaggccggccgagctggctcctctgtgcggccggcgcggccttagaacagacattgacgcaacctgcacccccagaagagccagttccaaccagcgcgggttgaatcagatctggaacgtcaagaagcagagtgtgtaccttatgaatctccggaaaagtggcaccctcggacaccccggatccctcgatgaaaccacttatgagcgcctggccgaggaaaccctggattccctggctgagttcttcgaggacctggctgacaaaccctacaccttcgaagactacgacgtttccttcggaagtggggtgctgacggtcaaacttggtggcgatcttggaacctatgttataaacaagcagactcccaacaaacagatctggctcagctctccaagttcaggacccaagaggtatgactggacgggcaagaattgggtctattctcacgacggagtgagccttcatgaactgttggctgccgaactgacaaaagcccttaagacgaaactggacctgtcctcattggcgtactctggtaaggatgcctaactcgaggacggggtgaactacgcctgaggatccgatctttttccctctgccaaaaattatggggacatcatgaagccccttgagcatctgacttctggctaataaaggaaatttattttcattgcaatagtgtgttggaattttttgtgtctctcactcggaagcaattcgttgatctgaatttcgaccacccataatacccattaccctggtagataagtagcatggcgggttaatcattaactacaaggaacccctagtgatggagttggccactccctctctgcgcgctcgctcgctcactgaggccgggcgaccaaaggtcgcccgacgcccgggctttgcccgggcggcctcagtgagcgagcgagcgcgcagccttaattaacctaattcactggccgtcgttttacaacgtcgtgactgggaaaaccctggcgttacccaacttaatcgccttgcagcacatccccctttcgccagctggcgtaatagcgaagaggcccgcaccgatcgcccttcccaacagttgcgcagcctgaatggcgaatgggacgcgccctgtagcggcgcattaagcgcggcgggtgtggtggttacgcgcagcgtgaccgctacacttgccagcgccctagcgcccgctcctttcgctttcttcccttcctttctcgccacgttcgccggctttccccgtcaagctctaaatcgggggctccctttagggttccgatttagtgctttacggcacctcgaccccaaaaaacttgattagggtgatggttcacgtagtgggccatcgccctgatagacggtttttcgccctttgacgttggagtccacgttctttaatagtggactcttgttccaaactggaacaacactcaaccctatctcggtctattcttttgatttataagggattttgccgatttcggcctattggttaaaaaatgagctgatttaacaaaaatttaacgcgaattttaacaaaatattaacgcttacaatttaggtggcacttttcggggaaatgtgcgcggaacccctatttgtttatttttctaaatacattcaaatatgtatccgctcatgagacaataaccctgataaatgcttcaataatattgaaaaaggaagagtatgagtattcaacatttccgtgtcgcccttattcccttttttgcggcattttgccttcctgtttttgctcacccagaaacgctggtgaaagtaaaagatgctgaagatcagttgggtgcacgagtgggttacatcgaactggatctcaacagcggtaagatccttgagagttttcgccccgaagaacgttttccaatgatgagcacttttaaagttctgctatgtggcgcggtattatcccgtattgacgccgggcaagagcaactcggtcgccgcatacactattctcagaatgacttggttgagtactcaccagtcacagaaaagcatcttacggatggcatgacagtaagagaattatgcagtgctgccataaccatgagtgataacactgcggccaacttacttctgacaacgatcggaggaccgaaggagctaaccgcttttttgcacaacatgggggatcatgtaactcgccttgatcgttgggaaccggagctgaatgaagccataccaaacgacgagcgtgacaccacgatgcctgtagcaatggcaacaacgttgcgcaaactattaactggcgaactacttactctagcttcccggcaacaattaatagactggatggaggcggataaagttgcaggaccacttctgcgctcggcccttccggctggctggtttattgctgataaatctggagccggtgagcgtgggtctcgcggtatcattgcagcactggggccagatggtaagccctcccgtatcgtagttatctacacgacggggagtcaggcaactatggatgaacgaaatagacagatcgctgagataggtgcctcactgattaagcattggtaactgtcagaccaagtttactcatatatactttagattgatttaaaacttcatttttaatttaaaaggatctaggtgaagatcctttttgataatctcatgaccaaaatcccttaacgtgagttttcgttccactgagcgtcagaccccgtagaaaagatcaaaggatcttcttgagatcctttttttctgcgcgtaatctgctgcttgcaaacaaaaaaaccaccgctaccagcggtggtttgtttgccggatcaagagctaccaactctttttccgaaggtaactggcttcagcagagcgcagataccaaatactgttcttctagtgtagccgtagttaggccaccacttcaagaactctgtagcaccgcctacatacctcgctctgctaatcctgttaccagtggctgctgccagtggcgataagtcgtgtcttaccgggttggactcaagacgatagttaccggataaggcgcagcggtcgggctgaacggggggttcgtgcacacagcccagcttggagcgaacgacctacaccgaactgagatacctacagcgtgagctatgagaaagcgccacgcttcccgaagggagaaaggcggacaggtatccggtaagcggcagggtcggaacaggagagcgcacgagggagcttccagggggaaacgcctggtatctttatagtcctgtcgggtttcgccacctctgacttgagcgtcgatttttgtgatgctcgtcaggggggcggagcctatggaaaaacgccagcaacgcggcctttttacggttcctggccttttgctggccttttgctcacatgttctttcctgcgttatcccctgattctgtggataaccgtattaccgcctttgagtgagctgataccgctcgccgcagccgaacgaccgagcgcagcgagtcagtgagcgaggaagcggaagagcgcccaatacgcaaaccgcctctccccgcgcgttggccgattcattaatgcagctggcacgacaggtttcccgactggaaagcgggcagtgagcgcaacgcaattaatgtgagttagctcactcattaggcaccccaggctttacactttatgcttccggctcgtatgttgtgtggaattgtgagcggataacaatttcacacaggaaacagctatgaccatgattacgccagatttaattaag

SEQ ID NO: 50 - DNA, 5586 bp, Artificial Sequence
  Description of Artificial Sequence: Synthetic polynucleotide
gccttaattaggctgcgcgctcgctcgctcactgaggccgcccgggcaaagcccgggcgtcgggcgacctttggtcgcccggcctcagtgagcgagcgagcgcgcagagagggagtggccaactccatcactaggggttccttgtagttaatgattaacccgccatgctacttatctaccagggtaatggggatcctctagaactatagctagtcgacgagctcccaggctcaagtgatcctcccgcctcagcctcctgagtagctgagatcacaggcatgcactaccacactcggctcacatttgacatcctctaaagcatatataaaatgtgaagaaaactttcacaatttgcatccctttgtaatatgtaacagaaataaaattctcttttaaaatctatcaacaataggcaaggcacggtggctcacgcctgtcgtctcagcactttgtgaggcccaggcgggcagatcgtttgagcctagaagttcaagaccaccctgggcaacatagcgaaaccccctttctacaaaaaatacaaaaactagctgggtgtggtggtgcacacctgtagtcccagctacttggaaggctgaaatgggaagactgcttgagcccgggagggagaagttgcagtaagccaggaccacaccactgcactccagcctgggcaacagagtgagactctgtctcaaacaaacaaataaatgaggcgggtggatcacgaggtcagtagatcgagaccatcctggctaacacggtgaaacccgtctctactaaaaaaaaaaaaaaatacaaaaaattagccaggcatggtggcgggcgcctgtagtcccagttactcgggaggctgaggcaggagaatggcgtgaaaccgggaggcagagcttgcagtgagccgagatcgcaccactgccctccagcctgggcgacagagcgagactccgtctcaatcaatcaatcaatcaataaaatctattaacaatatttattgtgcacttaacaggaacatgccctgtccaaaaaaaactttacagggcttaactcattttatccttaccacaatcctatgaagtaggaacttttataaaacgcattttataaacaaggcacagagaggttaattaacttgccctctggtcacacagctaggaagtgggcagagtacagatttacacaaggcatccgtctcctggccccacatacccaactgctgtaaacccataccggcggccaagcagcctcaatttgtgcatgcacccacttcccagcaagacagcagctcccaagttcctcctgtttagaattttagaagcggcgggccaccaggctgcagtctcccttgggtcaggggtcctggttgcactccgtgctttgcacaaagcaggctctccatttttgttaaatgcacgaatagtgctaagctgggaagttcttcctgaggtctaacctctagctgctcccccacagaagagtgcctgcggccagtggccaccaggggtcgccgcagcacccagcgctggagggcggagcgggcggcagacccggagcagcaagtggactctctcgagaagcttgaactgaaaaaccagaaagttaactggtaagtttagtctttttgtcttttatttcaggtcccggatccggtggtggtgcaaatcaaagaactgctcctcagtggatgttgcctttacttctaggcctgtacggaagtgttacttctgctctaaaagctgcggaattgtacccgcggccgatccaccggtatgtggactctggggaggcgcgccgttgccggactcctggcatctccaagcccagcgcaggctcaaaccctcacgcgcgttcccaggccagccgagttggcccccctttgtggcaggcgcggcctgaggacagatatcgacgccacatgcactcctcgccgcgcctccagcaatcaaaggggtttgaaccaaatttggaacgtcaagaagcaatcagtgtatctcatgaatctgagaaagagcggcacactcggtcatcccggaagtctggacgaaaccacatacgaacggctcgccgaggaaacgctggatagcctggccgagtttttcgaggacctggctgataaaccgtatactttcgaagattatgacgtgtcattcgggagcggcgtactgaccgtcaaattgggcggtgacctggggacatacgtgattaacaagcagactcctaataaacagatttggttgagctctccttccagcgggcctaaacgctatgattggacagggaagaattgggtttacagtcacgacggagttagccttcacgagctcttggcagcggagctgacaaaggcgctcaagaccaaactcgacctgtcttcactcgcctattcaggcaaagacgcctgactcgaggacggggtgaactacgcctgaggatccgatctttttccctctgccaaaaattatggggacatcatgaagccccttgagcatctgacttctggctaataaaggaaatttattttcattgcaatagtgtgttggaattttttgtgtctctcactcggaagcaattcgttgatctgaatttcgaccacccataatacccattaccctggtagataagtagcatggcgggttaatcattaactacaaggaacccctagtgatggagttggccactccctctctgcgcgctcgctcgctcactgaggccgggcgaccaaaggtcgcccgacgcccgggctttgcccgggcggcctcagtgagcgagcgagcgcgcagccttaattaacctaattcactggccgtcgttttacaacgtcgtgactgggaaaaccctggcgttacccaacttaatcgccttgcagcacatccccctttcgccagctggcgtaatagcgaagaggcccgcaccgatcgcccttcccaacagttgcgcagcctgaatggcgaatgggacgcgccctgtagcggcgcattaagcgcggcgggtgtggtggttacgcgcagcgtgaccgctacacttgccagcgccctagcgcccgctcctttcgctttcttcccttcctttctcgccacgttcgccggctttccccgtcaagctctaaatcgggggctccctttagggttccgatttagtgctttacggcacctcgaccccaaaaaacttgattagggtgatggttcacgtagtgggccatcgccctgatagacggtttttcgccctttgacgttggagtccacgttctttaatagtggactcttgttccaaactggaacaacactcaaccctatctcggtctattcttttgatttataagggattttgccgatttcggcctattggttaaaaaatgagctgatttaacaaaaatttaacgcgaattttaacaaaatattaacgcttacaatttaggtggcacttttcggggaaatgtgcgcggaacccctatttgtttatttttctaaatacattcaaatatgtatccgctcatgagacaataaccctgataaatgcttcaataatattgaaaaaggaagagtatgagtattcaacatttccgtgtcgcccttattcccttttttgcggcattttgccttcctgtttttgctcacccagaaacgctggtgaaagtaaaagatgctgaagatcagttgggtgcacgagtgggttacatcgaactggatctcaacagcggtaagatccttgagagttttcgccccgaagaacgttttccaatgatgagcacttttaaagttctgctatgtggcgcggtattatcccgtattgacgccgggcaagagcaactcggtcgccgcatacactattctcagaatgacttggttgagtactcaccagtcacagaaaagcatcttacggatggcatgacagtaagagaattatgcagtgctgccataaccatgagtgataacactgcggccaacttacttctgacaacgatcggaggaccgaaggagctaaccgcttttttgcacaacatgggggatcatgtaactcgccttgatcgttgggaaccggagctgaatgaagccataccaaacgacgagcgtgacaccacgatgcctgtagcaatggcaacaacgttgcgcaaactattaactggcgaactacttactctagcttcccggcaacaattaatagactggatggaggcggataaagttgcaggaccacttctgcgctcggcccttccggctggctggtttattgctgataaatctggagccggtgagcgtgggtctcgcggtatcattgcagcactggggccagatggtaagccctcccgtatcgtagttatctacacgacggggagtcaggcaactatggatgaacgaaatagacagatcgctgagataggtgcctcactgattaagcattggtaactgtcagaccaagtttactcatatatactttagattgatttaaaacttcatttttaatttaaaaggatctaggtgaagatcctttttgataatctcatgaccaaaatcccttaacgtgagttttcgttccactgagcgtcagaccccgtagaaaagatcaaaggatcttcttgagatcctttttttctgcgcgtaatctgctgcttgcaaacaaaaaaaccaccgctaccagcggtggtttgtttgccggatcaagagctaccaactctttttccgaaggtaactggcttcagcagagcgcagataccaaatactgttcttctagtgtagccgtagttaggccaccacttcaagaactctgtagcaccgcctacatacctcgctctgctaatcctgttaccagtggctgctgccagtggcgataagtcgtgtcttaccgggttggactcaagacgatagttaccggataaggcgcagcggtcgggctgaacggggggttcgtgcacacagcccagcttggagcgaacgacctacaccgaactgagatacctacagcgtgagctatgagaaagcgccacgcttcccgaagggagaaaggcggacaggtatccggtaagcggcagggtcggaacaggagagcgcacgagggagcttccagggggaaacgcctggtatctttatagtcctgtcgggtttcgccacctctgacttgagcgtcgatttttgtgatgctcgtcaggggggcggagcctatggaaaaacgccagcaacgcggcctttttacggttcctggccttttgctggccttttgctcacatgttctttcctgcgttatcccctgattctgtggataaccgtattaccgcctttgagtgagctgataccgctcgccgcagccgaacgaccgagcgcagcgagtcagtgagcgaggaagcggaagagcgcccaatacgcaaaccgcctctccccgcgcgttggccgattcattaatgcagctggcacgacaggtttcccgactggaaagcgggcagtgagcgcaacgcaattaatgtgagttagctcactcattaggcaccccaggctttacactttatgcttccggctcgtatgttgtgtggaattgtgagcggataacaatttcacacaggaaacagctatgaccatgattacgccagatttaattaag

SEQ ID NO: 51 - DNA, 5586 bp, Artificial Sequence
  Description of Artificial Sequence: Synthetic polynucleotide
gccttaattaggctgcgcgctcgctcgctcactgaggccgcccgggcaaagcccgggcgtcgggcgacctttggtcgcccggcctcagtgagcgagcgagcgcgcagagagggagtggccaactccatcactaggggttccttgtagttaatgattaacccgccatgctacttatctaccagggtaatggggatcctctagaactatagctagtcgacgagctcccaggctcaagtgatcctcccgcctcagcctcctgagtagctgagatcacaggcatgcactaccacactcggctcacatttgacatcctctaaagcatatataaaatgtgaagaaaactttcacaatttgcatccctttgtaatatgtaacagaaataaaattctcttttaaaatctatcaacaataggcaaggcacggtggctcacgcctgtcgtctcagcactttgtgaggcccaggcgggcagatcgtttgagcctagaagttcaagaccaccctgggcaacatagcgaaaccccctttctacaaaaaatacaaaaactagctgggtgtggtggtgcacacctgtagtcccagctacttggaaggctgaaatgggaagactgcttgagcccgggagggagaagttgcagtaagccaggaccacaccactgcactccagcctgggcaacagagtgagactctgtctcaaacaaacaaataaatgaggcgggtggatcacgaggtcagtagatcgagaccatcctggctaacacggtgaaacccgtctctactaaaaaaaaaaaaaaatacaaaaaattagccaggcatggtggcgggcgcctgtagtcccagttactcgggaggctgaggcaggagaatggcgtgaaaccgggaggcagagcttgcagtgagccgagatcgcaccactgccctccagcctgggcgacagagcgagactccgtctcaatcaatcaatcaatcaataaaatctattaacaatatttattgtgcacttaacaggaacatgccctgtccaaaaaaaactttacagggcttaactcattttatccttaccacaatcctatgaagtaggaacttttataaaacgcattttataaacaaggcacagagaggttaattaacttgccctctggtcacacagctaggaagtgggcagagtacagatttacacaaggcatccgtctcctggccccacatacccaactgctgtaaacccataccggcggccaagcagcctcaatttgtgcatgcacccacttcccagcaagacagcagctcccaagttcctcctgtttagaattttagaagcggcgggccaccaggctgcagtctcccttgggtcaggggtcctggttgcactccgtgctttgcacaaagcaggctctccatttttgttaaatgcacgaatagtgctaagctgggaagttcttcctgaggtctaacctctagctgctcccccacagaagagtgcctgcggccagtggccaccaggggtcgccgcagcacccagcgctggagggcggagcgggcggcagacccggagcagcaagtggactctctcgagaagcttgaactgaaaaaccagaaagttaactggtaagtttagtctttttgtcttttatttcaggtcccggatccggtggtggtgcaaatcaaagaactgctcctcagtggatgttgcctttacttctaggcctgtacggaagtgttacttctgctctaaaagctgcggaattgtacccgcggccgatccaccggtatgtggacactcgggcgacgcgccgtggctgggctgcttgcttccccaagtcccgcacaggcgcaaaccctcacaagggtcccacggccagctgaattggccccgctgtgcggtcggaggggcctgcgaacagatatagacgcaacgtgcacccccagaagagcaagcagcaaccagagaggcctcaatcagatttggaacgtcaagaaacagagtgtctatctgatgaacctccgcaaatcagggacccttggtcatccgggatctcttgatgaaacgacctatgaacggctggctgaggagacgcttgactccctggcagagttcttcgaggatctggctgataagccatacacgttcgaggactatgatgtttcttttggttctggcgtcctgacggtgaaactcggaggggatctgggcacttacgttatcaacaaacagactcccaataaacagatttggttgtctagtcctagcagtggcccaaaacgctatgactggacgggcaagaactgggtgtactcccacgatggagttagcctgcacgaacttctggccgctgagcttactaaagcgctgaagactaagctggatctctccagcctcgcatacagcggcaaagacgcctagctcgaggacggggtgaactacgcctgaggatccgatctttttccctctgccaaaaattatggggacatcatgaagccccttgagcatctgacttctggctaataaaggaaatttattttcattgcaatagtgtgttggaattttttgtgtctctcactcggaagcaattcgttgatctgaatttcgaccacccataatacccattaccctggtagataagtagcatggcgggttaatcattaactacaaggaacccctagtgatggagttggccactccctctctgcgcgctcgctcgctcactgaggccgggcgaccaaaggtcgcccgacgcccgggctttgcccgggcggcctcagtgagcgagcgagcgcgcagccttaattaacctaattcactggccgtcgttttacaacgtcgtgactgggaaaaccctggcgttacccaacttaatcgccttgcagcacatccccctttcgccagctggcgtaatagcgaagaggcccgcaccgatcgcccttcccaacagttgcgcagcctgaatggcgaatgggacgcgccctgtagcggcgcattaagcgcggcgggtgtggtggttacgcgcagcgtgaccgctacacttgccagcgccctagcgcccgctcctttcgctttcttcccttcctttctcgccacgttcgccggctttccccgtcaagctctaaatcgggggctccctttagggttccgatttagtgctttacggcacctcgaccccaaaaaacttgattagggtgatggttcacgtagtgggccatcgccctgatagacggtttttcgccctttgacgttggagtccacgttctttaatagtggactcttgttccaaactggaacaacactcaaccctatctcggtctattcttttgatttataagggattttgccgatttcggcctattggttaaaaaatgagctgatttaacaaaaatttaacgcgaattttaacaaaatattaacgcttacaatttaggtggcacttttcggggaaatgtgcgcggaacccctatttgtttatttttctaaatacattcaaatatgtatccgctcatgagacaataaccctgataaatgcttcaataatattgaaaaaggaagagtatgagtattcaacatttccgtgtcgcccttattcccttttttgcggcattttgccttcctgtttttgctcacccagaaacgctggtgaaagtaaaagatgctgaagatcagttgggtgcacgagtgggttacatcgaactggatctcaacagcggtaagatccttgagagttttcgccccgaagaacgttttccaatgatgagcacttttaaagttctgctatgtggcgcggtattatcccgtattgacgccgggcaagagcaactcggtcgccgcatacactattctcagaatgacttggttgagtactcaccagtcacagaaaagcatcttacggatggcatgacagtaagagaattatgcagtgctgccataaccatgagtgataacactgcggccaacttacttctgacaacgatcggaggaccgaaggagctaaccgcttttttgcacaacatgggggatcatgtaactcgccttgatcgttgggaaccggagctgaatgaagccataccaaacgacgagcgtgacaccacgatgcctgtagcaatggcaacaacgttgcgcaaactattaactggcgaactacttactctagcttcccggcaacaattaatagactggatggaggcggataaagttgcaggaccacttctgcgctcggcccttccggctggctggtttattgctgataaatctggagccggtgagcgtgggtctcgcggtatcattgcagcactggggccagatggtaagccctcccgtatcgtagttatctacacgacggggagtcaggcaactatggatgaacgaaatagacagatcgctgagataggtgcctcactgattaagcattggtaactgtcagaccaagtttactcatatatactttagattgatttaaaacttcatttttaatttaaaaggatctaggtgaagatcctttttgataatctcatgaccaaaatcccttaacgtgagttttcgttccactgagcgtcagaccccgtagaaaagatcaaaggatcttcttgagatcctttttttctgcgcgtaatctgctgcttgcaaacaaaaaaaccaccgctaccagcggtggtttgtttgccggatcaagagctaccaactctttttccgaaggtaactggcttcagcagagcgcagataccaaatactgttcttctagtgtagccgtagttaggccaccacttcaagaactctgtagcaccgcctacatacctcgctctgctaatcctgttaccagtggctgctgccagtggcgataagtcgtgtcttaccgggttggactcaagacgatagttaccggataaggcgcagcggtcgggctgaacggggggttcgtgcacacagcccagcttggagcgaacgacctacaccgaactgagatacctacagcgtgagctatgagaaagcgccacgcttcccgaagggagaaaggcggacaggtatccggtaagcggcagggtcggaacaggagagcgcacgagggagcttccagggggaaacgcctggtatctttatagtcctgtcgggtttcgccacctctgacttgagcgtcgatttttgtgatgctcgtcaggggggcggagcctatggaaaaacgccagcaacgcggcctttttacggttcctggccttttgctggccttttgctcacatgttctttcctgcgttatcccctgattctgtggataaccgtattaccgcctttgagtgagctgataccgctcgccgcagccgaacgaccgagcgcagcgagtcagtgagcgaggaagcggaagagcgcccaatacgcaaaccgcctctccccgcgcgttggccgattcattaatgcagctggcacgacaggtttcccgactggaaagcgggcagtgagcgcaacgcaattaatgtgagttagctcactcattaggcaccccaggctttacactttatgcttccggctcgtatgttgtgtggaattgtgagcggataacaatttcacacaggaaacagctatgaccatgattacgccagatttaattaag

SEQ ID NO: 52 - DNA, 5586 bp, Artificial Sequence
  Description of Artificial Sequence: Synthetic polynucleotide
gccttaattaggctgcgcgctcgctcgctcactgaggccgcccgggcaaagcccgggcgtcgggcgacctttggtcgcccggcctcagtgagcgagcgagcgcgcagagagggagtggccaactccatcactaggggttccttgtagttaatgattaacccgccatgctacttatctaccagggtaatggggatcctctagaactatagctagtcgacgagctcccaggctcaagtgatcctcccgcctcagcctcctgagtagctgagatcacaggcatgcactaccacactcggctcacatttgacatcctctaaagcatatataaaatgtgaagaaaactttcacaatttgcatccctttgtaatatgtaacagaaataaaattctcttttaaaatctatcaacaataggcaaggcacggtggctcacgcctgtcgtctcagcactttgtgaggcccaggcgggcagatcgtttgagcctagaagttcaagaccaccctgggcaacatagcgaaaccccctttctacaaaaaatacaaaaactagctgggtgtggtggtgcacacctgtagtcccagctacttggaaggctgaaatgggaagactgcttgagcccgggagggagaagttgcagtaagccaggaccacaccactgcactccagcctgggcaacagagtgagactctgtctcaaacaaacaaataaatgaggcgggtggatcacgaggtcagtagatcgagaccatcctggctaacacggtgaaacccgtctctactaaaaaaaaaaaaaaatacaaaaaattagccaggcatggtggcgggcgcctgtagtcccagttactcgggaggctgaggcaggagaatggcgtgaaaccgggaggcagagcttgcagtgagccgagatcgcaccactgccctccagcctgggcgacagagcgagactccgtctcaatcaatcaatcaatcaataaaatctattaacaatatttattgtgcacttaacaggaacatgccctgtccaaaaaaaactttacagggcttaactcattttatccttaccacaatcctatgaagtaggaacttttataaaacgcattttataaacaaggcacagagaggttaattaacttgccctctggtcacacagctaggaagtgggcagagtacagatttacacaaggcatccgtctcctggccccacatacccaactgctgtaaacccataccggcggccaagcagcctcaatttgtgcatgcacccacttcccagcaagacagcagctcccaagttcctcctgtttagaattttagaagcggcgggccaccaggctgcagtctcccttgggtcaggggtcctggttgcactccgtgctttgcacaaagcaggctctccatttttgttaaatgcacgaatagtgctaagctgggaagttcttcctgaggtctaacctctagctgctcccccacagaagagtgcctgcggccagtggccaccaggggtcgccgcagcacccagcgctggagggcggagcgggcggcagacccggagcagcaagtggactctctcgagaagcttgaactgaaaaaccagaaagttaactggtaagtttagtctttttgtcttttatttcaggtcccggatccggtggtggtgcaaatcaaagaactgctcctcagtggatgttgcctttacttctaggcctgtacggaagtgttacttctgctctaaaagctgcggaattgtacccgcggccgatccaccggtatgtggactctgggtcgacgcgccgtagccggtctcttggcctccccatcccctgcgcaggcacagacccttacacgagttccacggcccgctgaactggcaccactctgcggacgccggggcctgagaaccgatattgacgctacgtgcactccccgacgagcctcttctaatcagagggggctcaaccagatctggaacgtgaagaagcagtcagtctacttgatgaatctgagaaagagcgggacccttgggcaccccgggtctctcgacgagactacatacgagaggctggccgaggagactttggactctctcgccgaattcttcgaggatttggcagacaagccgtacacctttgaagactacgatgtctcattcggatcaggggtgctgacggttaaactggggggcgatctcggaacctacgtcataaacaaacagacacccaataagcagatctggttgtctagcccatcatccggtcctaaacggtacgactggaccggcaagaactgggtctactcccatgacggagtcagtcttcatgaactgcttgccgcagagctgaccaaggctcttaagacgaaactggatctctctagcctggcctactccgggaaggatgcatagctcgaggacggggtgaactacgcctgaggatccgatctttttccctctgccaaaaattatggggacatcatgaagccccttgagcatctgacttctggctaataaaggaaatttattttcattgcaatagtgtgttggaattttttgtgtctctcactcggaagcaattcgttgatctgaatttcgaccacccataatacccattaccctggtagataagtagcatggcgggttaatcattaactacaaggaacccctagtgatggagttggccactccctctctgcgcgctcgctcgctcactgaggccgggcgaccaaaggtcgcccgacgcccgggctttgcccgggcggcctcagtgagcgagcgagcgcgcagccttaattaacctaattcactggccgtcgttttacaacgtcgtgactgggaaaaccctggcgttacccaacttaatcgccttgcagcacatccccctttcgccagctggcgtaatagcgaagaggcccgcaccgatcgcccttcccaacagttgcgcagcctgaatggcgaatgggacgcgccctgtagcggcgcattaagcgcggcgggtgtggtggttacgcgcagcgtgaccgctacacttgccagcgccctagcgcccgctcctttcgctttcttcccttcctttctcgccacgttcgccggctttccccgtcaagctctaaatcgggggctccctttagggttccgatttagtgctttacggcacctcgaccccaaaaaacttgattagggtgatggttcacgtagtgggccatcgccctgatagacggtttttcgccctttgacgttggagtccacgttctttaatagtggactcttgttccaaactggaacaacactcaaccctatctcggtctattcttttgatttataagggattttgccgatttcggcctattggttaaaaaatgagctgatttaacaaaaatttaacgcgaattttaacaaaatattaacgcttacaatttaggtggcacttttcggggaaatgtgcgcggaacccctatttgtttatttttctaaatacattcaaatatgtatccgctcatgagacaataaccctgataaatgcttcaataatattgaaaaaggaagagtatgagtattcaacatttccgtgtcgcccttattcccttttttgcggcattttgccttcctgtttttgctcacccagaaacgctggtgaaagtaaaagatgctgaagatcagttgggtgcacgagtgggttacatcgaactggatctcaacagcggtaagatccttgagagttttcgccccgaagaacgttttccaatgatgagcacttttaaagttctgctatgtggcgcggtattatcccgtattgacgccgggcaagagcaactcggtcgccgcatacactattctcagaatgacttggttgagtactcaccagtcacagaaaagcatcttacggatggcatgacagtaagagaattatgcagtgctgccataaccatgagtgataacactgcggccaacttacttctgacaacgatcggaggaccgaaggagctaaccgcttttttgcacaacatgggggatcatgtaactcgccttgatcgttgggaaccggagctgaatgaagccataccaaacgacgagcgtgacaccacgatgcctgtagcaatggcaacaacgttgcgcaaactattaactggcgaactacttactctagcttcccggcaacaattaatagactggatggaggcggataaagttgcaggaccacttctgcgctcggcccttccggctggctggtttattgctgataaatctggagccggtgagcgtgggtctcgcggtatcattgcagcactggggccagatggtaagccctcccgtatcgtagttatctacacgacggggagtcaggcaactatggatgaacgaaatagacagatcgctgagataggtgcctcactgattaagcattggtaactgtcagaccaagtttactcatatatactttagattgatttaaaacttcatttttaatttaaaaggatctaggtgaagatcctttttgataatctcatgaccaaaatcccttaacgtgagttttcgttccactgagcgtcagaccccgtagaaaagatcaaaggatcttcttgagatcctttttttctgcgcgtaatctgctgcttgcaaacaaaaaaaccaccgctaccagcggtggtttgtttgccggatcaagagctaccaactctttttccgaaggtaactggcttcagcagagcgcagataccaaatactgttcttctagtgtagccgtagttaggccaccacttcaagaactctgtagcaccgcctacatacctcgctctgctaatcctgttaccagtggctgctgccagtggcgataagtcgtgtcttaccgggttggactcaagacgatagttaccggataaggcgcagcggtcgggctgaacggggggttcgtgcacacagcccagcttggagcgaacgacctacaccgaactgagatacctacagcgtgagctatgagaaagcgccacgcttcccgaagggagaaaggcggacaggtatccggtaagcggcagggtcggaacaggagagcgcacgagggagcttccagggggaaacgcctggtatctttatagtcctgtcgggtttcgccacctctgacttgagcgtcgatttttgtgatgctcgtcaggggggcggagcctatggaaaaacgccagcaacgcggcctttttacggttcctggccttttgctggccttttgctcacatgttctttcctgcgttatcccctgattctgtggataaccgtattaccgcctttgagtgagctgataccgctcgccgcagccgaacgaccgagcgcagcgagtcagtgagcgaggaagcggaagagcgcccaatacgcaaaccgcctctccccgcgcgttggccgattcattaatgcagctggcacgacaggtttcccgactggaaagcgggcagtgagcgcaacgcaattaatgtgagttagctcactcattaggcaccccaggctttacactttatgcttccggctcgtatgttgtgtggaattgtgagcggataacaatttcacacaggaaacagctatgaccatgattacgccagatttaattaag

SEQ ID NO: 53 - DNA, 6434 bp, Artificial Sequence
  Description of Artificial Sequence: Synthetic polynucleotide
gccttaattaggctgcgcgctcgctcgctcactgaggccgcccgggcaaagcccgggcgtcgggcgacctttggtcgcccggcctcagtgagcgagcgagcgcgcagagagggagtggccaactccatcactaggggttccttgtagttaatgattaacccgccatgctacttatctaccagggtaatggggacgcgtcccacctccctctctgtgctgggactcacagagggagacctcaggaggcagtctgtccatcacatgtccaaatgcagagcataccctgggctgggcgcagtggcgcacaactgtaattccagcactttgggaggctgatgtggaaggatcacttgagcccagaagttctagaccagcctgggcaacatggcaagaccctatctctacaaaaaaagttaaaaaatcagccacgtgtggtgacacacacctgtagtcccagctattcaggaggctgaggtgaggggatcacttaaggctgggaggttgaggctgcagtgagtcgtggttgcgccactgcactccagcctgggcaacagtgagaccctgtctcaaaagacaaaaaaaaaaaaaaaaaaaaaaagaacatatcctggtgtggagtaggggacgctgctctgacagaggctcgggggcctgagctggctctgtgagctggggaggaggcagacagccaggccttgtctgcaagcagacctggcagcattgggctggccgccccccagggcctcctcttcatgcccagtgaatgactcaccttggcacagacacaatgttcggggtgggcacagtgcctgcttcccgccgcaccccagcccccctcaaatgccttccgagaagcccattgagcagggggcttgcattgcaccccagcctgacagcctggcatcttgggataaaagcagcacagccccctaggggctgcccttgctgtgtggcgccaccggcggtggagaacaaggctctattcagcctgtgcccaggaaaggggatcaggggatgcccaggcatggacagtgggtggcagggggggagaggagggctgtctgcttcccagaagtccaaggacacaaatgggtgaggggactgggcagggttctgaccctgtgggaccagagtggagggcgtagatggacctgaagtctccagggacaacagggcccaggtctcaggctcctagttgggcccagtggctccagcgtttccaaacccatccatccccagaggttcttcccatctctccaggctgatgtgtgggaactcgaggaaataaatctccagtgggagacggaggggtggccagggaaacggggcgctgcaggaataaagacgagccagcacagccagctcatgtgtaacggctttgtggagctgtcaaggcctggtctctgggagagaggcacagggaggccagacaaggaaggggtgacctggagggacagatccaggggctaaagtcctgataaggcaagagagtgccggccccctcttgccctatcaggacctccactgccacatagaggccatgattgacccttagacaaagggctggtgtccaatcccagcccccagccccagaactccagggaatgaatgggcagagagcaggaatgtgggacatctgtgttcaagggaaggactccaggagtctgctgggaatgaggcctagtaggaaatgaggtggcccttgagggtacagaacaggttcattcttcgccaaattcccagcaccttgcaggcacttacagctgagtgagataatgcctgggttatgaaatcaaaaagttggaaagcaggtcagaggtcatctggtacagcccttccttccctttttttttttttttttttgtgagacaaggtctctctctgttgcccaggctggagtggcgcaaacacagctcactgcagcctcaacctactgggctcaagcaatcctccagcctcagcctcccaaagtgctgggattacaagcatgagccaccccactcagccctttccttcctttttaattgatgcataataattgtaagtattcatcatggtccaaccaaccctttcttgacccaccttcctagagagagggtcctcttgcttcagcggtcagggccccagacccatggtctggctccaggtaccacctgcctcatgcaggagttggcgtgcccaggaagctctgcctctgggcacagtgacctcagtggggtgaggggagctctccccatagctgggctgcggcccaaccccaccccctcaggctatgccagggggtgttgccaggggcacccgggcatcgccagtctagcccactccttcataaagccctcgcatcccaggagcgagcagagccagagcaggttggagaggagacgcatcacctccgctgctcgccgggatcctcgggagcaagcttgaactgaaaaaccagaaagttaactggtaagtttagtctttttgtcttttatttcaggtcccggatccggtggtggtgcaaatcaaagaactgctcctcagtggatgttgcctttacttctaggcctgtacggaagtgttacttctgctctaaaagctgcggaattgtacccgcggccgatccaccggtatgtggactctcgggcgccgcgcagtagccggcctcctggcgtcacccagcccggcccaggcccagaccctcacccgggtcccgcggccggcagagttggccccactctgcggccgccgtggcctgcgcaccgacatcgatgcgacctgcacgccccgccgcgcaagttcgaaccaacgtggcctcaaccagatttggaatgtcaaaaagcagagtgtctatttgatgaatttgaggaaatctggaactttgggccacccaggctctctagatgagaccacctatgaaagactagcagaggaaacgctggactctttagcagagttttttgaagaccttgcagacaagccatacacgtttgaggactatgatgtctcctttgggagtggtgtcttaactgtcaaactgggtggagatctaggaacctatgtgatcaacaagcagacgccaaacaagcaaatctggctatcttctccatccagtggacctaagcgttatgactggactgggaaaaactgggtgttctcccacgacggcgtgtccctccatgagctgctggccgcagagctcactaaagccttaaaaaccaaactggacttgtcttggttggcctattccggaaaagatgcttgactcgaggacggggtgaactacgcctgaggatccgatctttttccctctgccaaaaattatggggacatcatgaagccccttgagcatctgacttctggctaataaaggaaatttattttcattgcaatagtgtgttggaattttttgtgtctctcactcggaagcaattcgttgatctgaatttcgaccacccataatacccattaccctggtagataagtagcatggcgggttaatcattaactacaaggaacccctagtgatggagttggccactccctctctgcgcgctcgctcgctcactgaggccgggcgaccaaaggtcgcccgacgcccgggctttgcccgggcggcctcagtgagcgagcgagcgcgcagccttaattaacctaattcactggccgtcgttttacaacgtcgtgactgggaaaaccctggcgttacccaacttaatcgccttgcagcacatccccctttcgccagctggcgtaatagcgaagaggcccgcaccgatcgcccttcccaacagttgcgcagcctgaatggcgaatgggacgcgccctgtagcggcgcattaagcgcggcgggtgtggtggttacgcgcagcgtgaccgctacacttgccagcgccctagcgcccgctcctttcgctttcttcccttcctttctcgccacgttcgccggctttccccgtcaagctctaaatcgggggctccctttagggttccgatttagtgctttacggcacctcgaccccaaaaaacttgattagggtgatggttcacgtagtgggccatcgccctgatagacggtttttcgccctttgacgttggagtccacgttctttaatagtggactcttgttccaaactggaacaacactcaaccctatctcggtctattcttttgatttataagggattttgccgatttcggcctattggttaaaaaatgagctgatttaacaaaaatttaacgcgaattttaacaaaatattaacgcttacaatttaggtggcacttttcggggaaatgtgcgcggaacccctatttgtttatttttctaaatacattcaaatatgtatccgctcatgagacaataaccctgataaatgcttcaataatattgaaaaaggaagagtatgagtattcaacatttccgtgtcgcccttattcccttttttgcggcattttgccttcctgtttttgctcacccagaaacgctggtgaaagtaaaagatgctgaagatcagttgggtgcacgagtgggttacatcgaactggatctcaacagcggtaagatccttgagagttttcgccccgaagaacgttttccaatgatgagcacttttaaagttctgctatgtggcgcggtattatcccgtattgacgccgggcaagagcaactcggtcgccgcatacactattctcagaatgacttggttgagtactcaccagtcacagaaaagcatcttacggatggcatgacagtaagagaattatgcagtgctgccataaccatgagtgataacactgcggccaacttacttctgacaacgatcggaggaccgaaggagctaaccgcttttttgcacaacatgggggatcatgtaactcgccttgatcgttgggaaccggagctgaatgaagccataccaaacgacgagcgtgacaccacgatgcctgtagcaatggcaacaacgttgcgcaaactattaactggcgaactacttactctagcttcccggcaacaattaatagactggatggaggcggataaagttgcaggaccacttctgcgctcggcccttccggctggctggtttattgctgataaatctggagccggtgagcgtgggtctcgcggtatcattgcagcactggggccagatggtaagccctcccgtatcgtagttatctacacgacggggagtcaggcaactatggatgaacgaaatagacagatcgctgagataggtgcctcactgattaagcattggtaactgtcagaccaagtttactcatatatactttagattgatttaaaacttcatttttaatttaaaaggatctaggtgaagatcctttttgataatctcatgaccaaaatcccttaacgtgagttttcgttccactgagcgtcagaccccgtagaaaagatcaaaggatcttcttgagatcctttttttctgcgcgtaatctgctgcttgcaaacaaaaaaaccaccgctaccagcggtggtttgtttgccggatcaagagctaccaactctttttccgaaggtaactggcttcagcagagcgcagataccaaatactgttcttctagtgtagccgtagttaggccaccacttcaagaactctgtagcaccgcctacatacctcgctctgctaatcctgttaccagtggctgctgccagtggcgataagtcgtgtcttaccgggttggactcaagacgatagttaccggataaggcgcagcggtcgggctgaacggggggttcgtgcacacagcccagcttggagcgaacgacctacaccgaactgagatacctacagcgtgagctatgagaaagcgccacgcttcccgaagggagaaaggcggacaggtatccggtaagcggcagggtcggaacaggagagcgcacgagggagcttccagggggaaacgcctggtatctttatagtcctgtcgggtttcgccacctctgacttgagcgtcgatttttgtgatgctcgtcaggggggcggagcctatggaaaaacgccagcaacgcggcctttttacggttcctggccttttgctggccttttgctcacatgttctttcctgcgttatcccctgattctgtggataaccgtattaccgcctttgagtgagctgataccgctcgccgcagccgaacgaccgagcgcagcgagtcagtgagcgaggaagcggaagagcgcccaatacgcaaaccgcctctccccgcgcgttggccgattcattaatgcagctggcacgacaggtttcccgactggaaagcgggcagtgagcgcaacgcaattaatgtgagttagctcactcattaggcaccccaggctttacactttatgcttccggctcgtatgttgtgtggaattgtgagcggataacaatttcacacaggaaacagctatgaccatgattacgccagatttaattaag

SEQ ID NO: 54 - DNA, 4790 bp, Artificial Sequence
  Description of Artificial Sequence: Synthetic polynucleotide
gccttaattaggctgcgcgctcgctcgctcactgaggccgcccgggcaaagcccgggcgtcgggcgacctttggtcgcccggcctcagtgagcgagcgagcgcgcagagagggagtggccaactccatcactaggggttccttgtagttaatgattaacccgccatgctacttatctaccagggtaatggggatcctctagaactatagctagtcgactagtatctgcagagggccctgcgtatgagtgcaagtgggttttaggaccaggatgaggcggggtgggggtgcctacctgacgaccgaccccgacccactggacaagcacccaacccccattccccaaattgcgcatcccctatcagagagggggaggggaaacaggatgcggcgaggcgcgtgcgcactgccagcttcagcaccgcggacagtgccttcgcccccgcctggcggcgcgcgccaccgccgcctcagcactgaaggcgcgctgacgtcactcgccggtcccccgcaaactccccttcccggccaccttggtcgcgtccgcgccgccgccggcccagccggaccgcaccacgcgaggcgcgagataggggggcacgggcgcgaccatctgcgctgcggcgccggcgactcagcgctgcctcagtctgcggtgggcagcggaggagtcgtgtcgtgcctgagagcgcagctgtgctcctgggcaccgcgcagtccgcccccgcggctcctggccagaccacccctaggaccccctgccccaagtcgcagccaagcttgaactgaaaaaccagaaagttaactggtaagtttagtctttttgtcttttatttcaggtcccggatccggtggtggtgcaaatcaaagaactgctcctcagtggatgttgcctttacttctaggcctgtacggaagtgttacttctgctctaaaagctgcggaattgtacccgcggccgatccaccggtatgtggactctcgggcgccgcgcagtagccggcctcctggcgtcacccagcccagcccaggcccagaccctcacccgggtcccgcggccggcagagttggccccactctgcggccgccgtggcctgcgcaccgacatcgatgcgacctgcacgccccgccgcgcaagttcgaaccaacgtggcctcaaccagatttggaatgtcaaaaagcagagtgtctatttgatgaatttgaggaaatctggaactttgggccacccaggctctctagatgagaccacctatgaaagactagcagaggaaacgctggactctttagcagagttttttgaagaccttgcagacaagccatacacgtttgaggactatgatgtctcctttgggagtggtgtcttaactgtcaaactgggtggagatctaggaacctatgtgatcaacaagcagacgccaaacaagcaaatctggctatcttctccatccagtggacctaagcgttatgactggactgggaaaaactgggtgtactcccacgacggcgtgtccctccatgagctgctggccgcagagctcactaaagccttaaaaaccaaactggacttgtcttccttggcctattccggaaaagatgcttgactcgaggacggggtgaactacgcctgaggatccgatctttttccctctgccaaaaattatggggacatcatgaagccccttgagcatctgacttctggctaataaaggaaatttattttcattgcaatagtgtgttggaattttttgtgtctctcactcggaagcaattcgttgatctgaatttcgaccacccataatacccattaccctggtagataagtagcatggcgggttaatcattaactacaaggaacccctagtgatggagttggccactccctctctgcgcgctcgctcgctcactgaggccgggcgaccaaaggtcgcccgacgcccgggctttgcccgggcggcctcagtgagcgagcgagcgcgcagccttaattaacctaattcactggccgtcgttttacaacgtcgtgactgggaaaaccctggcgttacccaacttaatcgccttgcagcacatccccctttcgccagctggcgtaatagcgaagaggcccgcaccgatcgcccttcccaacagttgcgcagcctgaatggcgaatgggacgcgccctgtagcggcgcattaagcgcggcgggtgtggtggttacgcgcagcgtgaccgctacacttgccagcgccctagcgcccgctcctttcgctttcttcccttcctttctcgccacgttcgccggctttccccgtcaagctctaaatcgggggctccctttagggttccgatttagtgctttacggcacctcgaccccaaaaaacttgattagggtgatggttcacgtagtgggccatcgccctgatagacggtttttcgccctttgacgttggagtccacgttctttaatagtggactcttgttccaaactggaacaacactcaaccctatctcggtctattcttttgatttataagggattttgccgatttcggcctattggttaaaaaatgagctgatttaacaaaaatttaacgcgaattttaacaaaatattaacgcttacaatttaggtggcacttttcggggaaatgtgcgcggaacccctatttgtttatttttctaaatacattcaaatatgtatccgctcatgagacaataaccctgataaatgcttcaataatattgaaaaaggaagagtatgagtattcaacatttccgtgtcgcccttattcccttttttgcggcattttgccttcctgtttttgctcacccagaaacgctggtgaaagtaaaagatgctgaagatcagttgggtgcacgagtgggttacatcgaactggatctcaacagcggtaagatccttgagagttttcgccccgaagaacgttttccaatgatgagcacttttaaagttctgctatgtggcgcggtattatcccgtattgacgccgggcaagagcaactcggtcgccgcatacactattctcagaatgacttggttgagtactcaccagtcacagaaaagcatcttacggatggcatgacagtaagagaattatgcagtgctgccataaccatgagtgataacactgcggccaacttacttctgacaacgatcggaggaccgaaggagctaaccgcttttttgcacaacatgggggatcatgtaactcgccttgatcgttgggaaccggagctgaatgaagccataccaaacgacgagcgtgacaccacgatgcctgtagcaatggcaacaacgttgcgcaaactattaactggcgaactacttactctagcttcccggcaacaattaatagactggatggaggcggataaagttgcaggaccacttctgcgctcggcccttccggctggctggtttattgctgataaatctggagccggtgagcgtgggtctcgcggtatcattgcagcactggggccagatggtaagccctcccgtatcgtagttatctacacgacggggagtcaggcaactatggatgaacgaaatagacagatcgctgagataggtgcctcactgattaagcattggtaactgtcagaccaagtttactcatatatactttagattgatttaaaacttcatttttaatttaaaaggatctaggtgaagatcctttttgataatctcatgaccaaaatcccttaacgtgagttttcgttccactgagcgtcagaccccgtagaaaagatcaaaggatcttcttgagatcctttttttctgcgcgtaatctgctgcttgcaaacaaaaaaaccaccgctaccagcggtggtttgtttgccggatcaagagctaccaactctttttccgaaggtaactggcttcagcagagcgcagataccaaatactgttcttctagtgtagccgtagttaggccaccacttcaagaactctgtagcaccgcctacatacctcgctctgctaatcctgttaccagtggctgctgccagtggcgataagtcgtgtcttaccgggttggactcaagacgatagttaccggataaggcgcagcggtcgggctgaacggggggttcgtgcacacagcccagcttggagcgaacgacctacaccgaactgagatacctacagcgtgagctatgagaaagcgccacgcttcccgaagggagaaaggcggacaggtatccggtaagcggcagggtcggaacaggagagcgcacgagggagcttccagggggaaacgcctggtatctttatagtcctgtcgggtttcgccacctctgacttgagcgtcgatttttgtgatgctcgtcaggggggcggagcctatggaaaaacgccagcaacgcggcctttttacggttcctggccttttgctggccttttgctcacatgttctttcctgcgttatcccctgattctgtggataaccgtattaccgcctttgagtgagctgataccgctcgccgcagccgaacgaccgagcgcagcgagtcagtgagcgaggaagcggaagagcgcccaatacgcaaaccgcctctccccgcgcgttggccgattcattaatgcagctggcacgacaggtttcccgactggaaagcgggcagtgagcgcaacgcaattaatgtgagttagctcactcattaggcaccccaggctttacactttatgcttccggctcgtatgttgtgtggaattgtgagcggataacaatttcacacaggaaacagctatgaccatgattacgccagatttaattaag

SEQ ID NO: 55 - DNA, 4880 bp, Artificial Sequence
  Description of Artificial Sequence: Synthetic polynucleotide
gccttaattaggctgcgcgctcgctcgctcactgaggccgcccgggcaaagcccgggcgtcgggcgacctttggtcgcccggcctcagtgagcgagcgagcgcgcagagagggagtggccaactccatcactaggggttccttgtagttaatgattaacccgccatgctacttatctaccagggtaatggggatcctctagaactatagctagtcgacgagtcaatgggaaaaacccattggagccaagtacactgactcaatagggactttccattgggttttgcccagtacataaggtcaatagggggtgagtcaacaggaaagtcccattggagccaagtacattgagtcaatagggactttccaatgggttttgcccagtacataaggtcaatgggaggtaagccaatgggtttttcccattactgacatgtatactgagtcattagggactttccaatgggttttgcccagtacataaggtcaataggggtgaatcaacaggaaagtcccattggagccaagtacactgagtcaatagggactttccattgggttttgcccagtacaaaaggtcaatagggggtgagtcaatgggtttttcccattattggcacatacataaggtcaataggggtgactagtggagaagagcatgcttgagggctgagtgcccctcagtgggcagagagcacatggcccacagtccctgagaagttggggggaggggtgggcaattgaactggtgcctagagaaggtggggcttgggtaaactgggaaagtgatgtggtgtactggctccacctttttccccagggtgggggagaaccatatataagtgcagtagtctctgtgaacattcaagcttgaactgaaaaaccagaaagttaactggtaagtttagtctttttgtcttttatttcaggtcccggatccggtggtggtgcaaatcaaagaactgctcctcagtggatgttgcctttacttctaggcctgtacggaagtgttacttctgctctaaaagctgcggaattgtacccgcggccgatccaccggtatgtggactctcgggcgccgcgcagtagccggcctcctggcgtcacccagcccagcccaggcccagaccctcacccgggtcccgcggccggcagagttggccccactctgcggccgccgtggcctgcgcaccgacatcgatgcgacctgcacgccccgccgcgcaagttcgaaccaacgtggcctcaaccagatttggaatgtcaaaaagcagagtgtctatttgatgaatttgaggaaatctggaactttgggccacccaggctctctagatgagaccacctatgaaagactagcagaggaaacgctggactctttagcagagttttttgaagaccttgcagacaagccatacacgtttgaggactatgatgtctcctttgggagtggtgtcttaactgtcaaactgggtggagatctaggaacctatgtgatcaacaagcagacgccaaacaagcaaatctggctatcttctccatccagtggacctaagcgttatgactggactgggaaaaactgggtgtactcccacgacggcgtgtccctccatgagctgctggccgcagagctcactaaagccttaaaaaccaaactggacttgtcttccttggcctattccggaaaagatgcttgactcgaggacggggtgaactacgcctgaggatccgatctttttccctctgccaaaaattatggggacatcatgaagccccttgagcatctgacttctggctaataaaggaaatttattttcattgcaatagtgtgttggaattttttgtgtctctcactcggaagcaattcgttgatctgaatttcgaccacccataatacccattaccctggtagataagtagcatggcgggttaatcattaactacaaggaacccctagtgatggagttggccactccctctctgcgcgctcgctcgctcactgaggccgggcgaccaaaggtcgcccgacgcccgggctttgcccgggcggcctcagtgagcgagcgagcgcgcagccttaattaacctaattcactggccgtcgttttacaacgtcgtgactgggaaaaccctggcgttacccaacttaatcgccttgcagcacatccccctttcgccagctggcgtaatagcgaagaggcccgcaccgatcgcccttcccaacagttgcgcagcctgaatggcgaatgggacgcgccctgtagcggcgcattaagcgcggcgggtgtggtggttacgcgcagcgtgaccgctacacttgccagcgccctagcgcccgctcctttcgctttcttcccttcctttctcgccacgttcgccggctttccccgtcaagctctaaatcgggggctccctttagggttccgatttagtgctttacggcacctcgaccccaaaaaacttgattagggtgatggttcacgtagtgggccatcgccctgatagacggtttttcgccctttgacgttggagtccacgttctttaatagtggactcttgttccaaactggaacaacactcaaccctatctcggtctattcttttgatttataagggattttgccgatttcggcctattggttaaaaaatgagctgatttaacaaaaatttaacgcgaattttaacaaaatattaacgcttacaatttaggtggcacttttcggggaaatgtgcgcggaacccctatttgtttatttttctaaatacattcaaatatgtatccgctcatgagacaataaccctgataaatgcttcaataatattgaaaaaggaagagtatgagtattcaacatttccgtgtcgcccttattcccttttttgcggcattttgccttcctgtttttgctcacccagaaacgctggtgaaagtaaaagatgctgaagatcagttgggtgcacgagtgggttacatcgaactggatctcaacagcggtaagatccttgagagttttcgccccgaagaacgttttccaatgatgagcacttttaaagttctgctatgtggcgcggtattatcccgtattgacgccgggcaagagcaactcggtcgccgcatacactattctcagaatgacttggttgagtactcaccagtcacagaaaagcatcttacggatggcatgacagtaagagaattatgcagtgctgccataaccatgagtgataacactgcggccaacttacttctgacaacgatcggaggaccgaaggagctaaccgcttttttgcacaacatgggggatcatgtaactcgccttgatcgttgggaaccggagctgaatgaagccataccaaacgacgagcgtgacaccacgatgcctgtagcaatggcaacaacgttgcgcaaactattaactggcgaactacttactctagcttcccggcaacaattaatagactggatggaggcggataaagttgcaggaccacttctgcgctcggcccttccggctggctggtttattgctgataaatctggagccggtgagcgtgggtctcgcggtatcattgcagcactggggccagatggtaagccctcccgtatcgtagttatctacacgacggggagtcaggcaactatggatgaacgaaatagacagatcgctgagataggtgcctcactgattaagcattggtaactgtcagaccaagtttactcatatatactttagattgatttaaaacttcatttttaatttaaaaggatctaggtgaagatcctttttgataatctcatgaccaaaatcccttaacgtgagttttcgttccactgagcgtcagaccccgtagaaaagatcaaaggatcttcttgagatcctttttttctgcgcgtaatctgctgcttgcaaacaaaaaaaccaccgctaccagcggtggtttgtttgccggatcaagagctaccaactctttttccgaaggtaactggcttcagcagagcgcagataccaaatactgttcttctagtgtagccgtagttaggccaccacttcaagaactctgtagcaccgcctacatacctcgctctgctaatcctgttaccagtggctgctgccagtggcgataagtcgtgtcttaccgggttggactcaagacgatagttaccggataaggcgcagcggtcgggctgaacggggggttcgtgcacacagcccagcttggagcgaacgacctacaccgaactgagatacctacagcgtgagctatgagaaagcgccacgcttcccgaagggagaaaggcggacaggtatccggtaagcggcagggtcggaacaggagagcgcacgagggagcttccagggggaaacgcctggtatctttatagtcctgtcgggtttcgccacctctgacttgagcgtcgatttttgtgatgctcgtcaggggggcggagcctatggaaaaacgccagcaacgcggcctttttacggttcctggccttttgctggccttttgctcacatgttctttcctgcgttatcccctgattctgtggataaccgtattaccgcctttgagtgagctgataccgctcgccgcagccgaacgaccgagcgcagcgagtcagtgagcgaggaagcggaagagcgcccaatacgcaaaccgcctctccccgcgcgttggccgattcattaatgcagctggcacgacaggtttcccgactggaaagcgggcagtgagcgcaacgcaattaatgtgagttagctcactcattaggcaccccaggctttacactttatgcttccggctcgtatgttgtgtggaattgtgagcggataacaatttcacacaggaaacagctatgaccatgattacgccagatttaattaag

SEQ ID NO: 56 - DNA, 4881 bp, Artificial Sequence
  Description of Artificial Sequence: Synthetic polynucleotide
gccttaattaggctgcgcgctcgctcgctcactgaggccgcccgggcaaagcccgggcgtcgggcgacctttggtcgcccggcctcagtgagcgagcgagcgcgcagagagggagtggccaactccatcactaggggttccttgtagttaatgattaacccgccatgctacttatctaccagggtaatggggatcctctagaactatagctagtcgacgagtcaatgggaaaaacccattggagccaagtacactgactcaatagggactttccattgggttttgcccagtacataaggtcaatagggggtgagtcaacaggaaagtcccattggagccaagtacattgagtcaatagggactttccaatgggttttgcccagtacataaggtcaatgggaggtaagccaatgggtttttcccattactgacatgtatactgagtcattagggactttccaatgggttttgcccagtacataaggtcaataggggtgaatcaacaggaaagtcccattggagccaagtacactgagtcaatagggactttccattgggttttgcccagtacaaaaggtcaatagggggtgagtcaatgggtttttcccattattggcacatacataaggtcaataggggtgactagtcagtgggcagagcgcacatcgcccacagtccccgagaagttggggggaggggtcggcaattgaaccggtgcctagagaaggtggcgcggggtaaactgggaaagtgatgtcgtgtactggctccgcctttttcccgagggtgggggagaaccgtatataagtgcagtagtcgccgtgaacgttctttttcgcaacgggtttgccgccagaacacagctgaagcttgaactgaaaaaccagaaagttaactggtaagtttagtctttttgtcttttatttcaggtcccggatccggtggtggtgcaaatcaaagaactgctcctcagtggatgttgcctttacttctaggcctgtacggaagtgttacttctgctctaaaagctgcggaattgtacccgcggccgatccaccggtatgtggactctcgggcgccgcgcagtagccggcctcctggcgtcacccagcccagcccaggcccagaccctcacccgggtcccgcggccggcagagttggccccactctgcggccgccgtggcctgcgcaccgacatcgatgcgacctgcacgccccgccgcgcaagttcgaaccaacgtggcctcaaccagatttggaatgtcaaaaagcagagtgtctatttgatgaatttgaggaaatctggaactttgggccacccaggctctctagatgagaccacctatgaaagactagcagaggaaacgctggactctttagcagagttttttgaagaccttgcagacaagccatacacgtttgaggactatgatgtctcctttgggagtggtgtcttaactgtcaaactgggtggagatctaggaacctatgtgatcaacaagcagacgccaaacaagcaaatctggctatcttctccatccagtggacctaagcgttatgactggactgggaaaaactgggtgtactcccacgacggcgtgtccctccatgagctgctggccgcagagctcactaaagccttaaaaaccaaactggacttgtcttccttggcctattccggaaaagatgcttgactcgaggacggggtgaactacgcctgaggatccgatctttttccctctgccaaaaattatggggacatcatgaagccccttgagcatctgacttctggctaataaaggaaatttattttcattgcaatagtgtgttggaattttttgtgtctctcactcggaagcaattcgttgatctgaatttcgaccacccataatacccattaccctggtagataagtagcatggcgggttaatcattaactacaaggaacccctagtgatggagttggccactccctctctgcgcgctcgctcgctcactgaggccgggcgaccaaaggtcgcccgacgcccgggctttgcccgggcggcctcagtgagcgagcgagcgcgcagccttaattaacctaattcactggccgtcgttttacaacgtcgtgactgggaaaaccctggcgttacccaacttaatcgccttgcagcacatccccctttcgccagctggcgtaatagcgaagaggcccgcaccgatcgcccttcccaacagttgcgcagcctgaatggcgaatgggacgcgccctgtagcggcgcattaagcgcggcgggtgtggtggttacgcgcagcgtgaccgctacacttgccagcgccctagcgcccgctcctttcgctttcttcccttcctttctcgccacgttcgccggctttccccgtcaagctctaaatcgggggctccctttagggttccgatttagtgctttacggcacctcgaccccaaaaaacttgattagggtgatggttcacgtagtgggccatcgccctgatagacggtttttcgccctttgacgttggagtccacgttctttaatagtggactcttgttccaaactggaacaacactcaaccctatctcggtctattcttttgatttataagggattttgccgatttcggcctattggttaaaaaatgagctgatttaacaaaaatttaacgcgaattttaacaaaatattaacgcttacaatttaggtggcacttttcggggaaatgtgcgcggaacccctatttgtttatttttctaaatacattcaaatatgtatccgctcatgagacaataaccctgataaatgcttcaataatattgaaaaaggaagagtatgagtattcaacatttccgtgtcgcccttattcccttttttgcggcattttgccttcctgtttttgctcacccagaaacgctggtgaaagtaaaagatgctgaagatcagttgggtgcacgagtgggttacatcgaactggatctcaacagcggtaagatccttgagagttttcgccccgaagaacgttttccaatgatgagcacttttaaagttctgctatgtggcgcggtattatcccgtattgacgccgggcaagagcaactcggtcgccgcatacactattctcagaatgacttggttgagtactcaccagtcacagaaaagcatcttacggatggcatgacagtaagagaattatgcagtgctgccataaccatgagtgataacactgcggccaacttacttctgacaacgatcggaggaccgaaggagctaaccgcttttttgcacaacatgggggatcatgtaactcgccttgatcgttgggaaccggagctgaatgaagccataccaaacgacgagcgtgacaccacgatgcctgtagcaatggcaacaacgttgcgcaaactattaactggcgaactacttactctagcttcccggcaacaattaatagactggatggaggcggataaagttgcaggaccacttctgcgctcggcccttccggctggctggtttattgctgataaatctggagccggtgagcgtgggtctcgcggtatcattgcagcactggggccagatggtaagccctcccgtatcgtagttatctacacgacggggagtcaggcaactatggatgaacgaaatagacagatcgctgagataggtgcctcactgattaagcattggtaactgtcagaccaagtttactcatatatactttagattgatttaaaacttcatttttaatttaaaaggatctaggtgaagatcctttttgataatctcatgaccaaaatcccttaacgtgagttttcgttccactgagcgtcagaccccgtagaaaagatcaaaggatcttcttgagatcctttttttctgcgcgtaatctgctgcttgcaaacaaaaaaaccaccgctaccagcggtggtttgtttgccggatcaagagctaccaactctttttccgaaggtaactggcttcagcagagcgcagataccaaatactgttcttctagtgtagccgtagttaggccaccacttcaagaactctgtagcaccgcctacatacctcgctctgctaatcctgttaccagtggctgctgccagtggcgataagtcgtgtcttaccgggttggactcaagacgatagttaccggataaggcgcagcggtcgggctgaacggggggttcgtgcacacagcccagcttggagcgaacgacctacaccgaactgagatacctacagcgtgagctatgagaaagcgccacgcttcccgaagggagaaaggcggacaggtatccggtaagcggcagggtcggaacaggagagcgcacgagggagcttccagggggaaacgcctggtatctttatagtcctgtcgggtttcgccacctctgacttgagcgtcgatttttgtgatgctcgtcaggggggcggagcctatggaaaaacgccagcaacgcggcctttttacggttcctggccttttgctggccttttgctcacatgttctttcctgcgttatcccctgattctgtggataaccgtattaccgcctttgagtgagctgataccgctcgccgcagccgaacgaccgagcgcagcgagtcagtgagcgaggaagcggaagagcgcccaatacgcaaaccgcctctccccgcgcgttggccgattcattaatgcagctggcacgacaggtttcccgactggaaagcgggcagtgagcgcaacgcaattaatgtgagttagctcactcattaggcaccccaggctttacactttatgcttccggctcgtatgttgtgtggaattgtgagcggataacaatttcacacaggaaacagctatgaccatgattacgccagatttaattaag

SEQ ID NO: 57 - DNA, 4746 bp, Artificial Sequence
  Description of Artificial Sequence: Synthetic polynucleotide
gccttaattaggctgcgcgctcgctcgctcactgaggccgcccgggcaaagcccgggcgtcgggcgacctttggtcgcccggcctcagtgagcgagcgagcgcgcagagagggagtggccaactccatcactaggggttccttgtagttaatgattaacccgccatgctacttatctaccagggtaatggggatcctctagaactatagtccacggggttggggttgcgccttttccaaggcagccctgggtttgcgcagggacgcggctgctctgggcgtggttccgggaaacgcagcggcgccgaccctgggtctcgcacattcttcacgtccgttcgcagcgtcacccggatcttcgccgctacccttgtgggccccccggcgacgcttcctcgtccgcccctaagtcgggaaggttccttgcggttcgcggcgtgccggacgtgacaaacggaagccgcacgtctcactagtaccctcgcagacggacagcgccagggagcaatggcagcgcgccgaccgcgatgggctgtggccaatagcggctgctcagcagggcgcgccgagagcagcggccgggaaggggcggtgcgggaggcggggtgtggggcggtagtgtgggccctgttcctgcccgcgcggtgttccgcattctgcaagcctccggagcgcacgtcggcagtcggctccctcgttgaccgaatcaccgacctctctccccacgggagcaagcttgaactgaaaaaccagaaagttaactggtaagtttagtctttttgtcttttatttcaggtcccggatccggtggtggtgcaaatcaaagaactgctcctcagtggatgttgcctttacttctaggcctgtacggaagtgttacttctgctctaaaagctgcggaattgtacccgcggccgatccaccggtatgtggactctcgggcgccgcgcagtagccggcctcctggcgtcacccagcccagcccaggcccagaccctcacccgggtcccgcggccggcagagttggccccactctgcggccgccgtggcctgcgcaccgacatcgatgcgacctgcacgccccgccgcgcaagttcgaaccaacgtggcctcaaccagatttggaatgtcaaaaagcagagtgtctatttgatgaatttgaggaaatctggaactttgggccacccaggctctctagatgagaccacctatgaaagactagcagaggaaacgctggactctttagcagagttttttgaagaccttgcagacaagccatacacgtttgaggactatgatgtctcctttgggagtggtgtcttaactgtcaaactgggtggagatctaggaacctatgtgatcaacaagcagacgccaaacaagcaaatctggctatcttctccatccagtggacctaagcgttatgactggactgggaaaaactgggtgtactcccacgacggcgtgtccctccatgagctgctggccgcagagctcactaaagccttaaaaaccaaactggacttgtcttccttggcctattccggaaaagatgcttgactcgaggacggggtgaactacgcctgaggatccgatctttttccctctgccaaaaattatggggacatcatgaagccccttgagcatctgacttctggctaataaaggaaatttattttcattgcaatagtgtgttggaattttttgtgtctctcactcggaagcaattcgttgatctgaatttcgaccacccataatacccattaccctggtagataagtagcatggcgggttaatcattaactacaaggaacccctagtgatggagttggccactccctctctgcgcgctcgctcgctcactgaggccgggcgaccaaaggtcgcccgacgcccgggctttgcccgggcggcctcagtgagcgagcgagcgcgcagccttaattaacctaattcactggccgtcgttttacaacgtcgtgactgggaaaaccctggcgttacccaacttaatcgccttgcagcacatccccctttcgccagctggcgtaatagcgaagaggcccgcaccgatcgcccttcccaacagttgcgcagcctgaatggcgaatgggacgcgccctgtagcggcgcattaagcgcggcgggtgtggtggttacgcgcagcgtgaccgctacacttgccagcgccctagcgcccgctcctttcgctttcttcccttcctttctcgccacgttcgccggctttccccgtcaagctctaaatcgggggctccctttagggttccgatttagtgctttacggcacctcgaccccaaaaaacttgattagggtgatggttcacgtagtgggccatcgccctgatagacggtttttcgccctttgacgttggagtccacgttctttaatagtggactcttgttccaaactggaacaacactcaaccctatctcggtctattcttttgatttataagggattttgccgatttcggcctattggttaaaaaatgagctgatttaacaaaaatttaacgcgaattttaacaaaatattaacgcttacaatttaggtggcacttttcggggaaatgtgcgcggaacccctatttgtttatttttctaaatacattcaaatatgtatccgctcatgagacaataaccctgataaatgcttcaataatattgaaaaaggaagagtatgagtattcaacatttccgtgtcgcccttattcccttttttgcggcattttgccttcctgtttttgctcacccagaaacgctggtgaaagtaaaagatgctgaagatcagttgggtgcacgagtgggttacatcgaactggatctcaacagcggtaagatccttgagagttttcgccccgaagaacgttttccaatgatgagcacttttaaagttctgctatgtggcgcggtattatcccgtattgacgccgggcaagagcaactcggtcgccgcatacactattctcagaatgacttggttgagtactcaccagtcacagaaaagcatcttacggatggcatgacagtaagagaattatgcagtgctgccataaccatgagtgataacactgcggccaacttacttctgacaacgatcggaggaccgaaggagctaaccgcttttttgcacaacatgggggatcatgtaactcgccttgatcgttgggaaccggagctgaatgaagccataccaaacgacgagcgtgacaccacgatgcctgtagcaatggcaacaacgttgcgcaaactattaactggcgaactacttactctagcttcccggcaacaattaatagactggatggaggcggataaagttgcaggaccacttctgcgctcggcccttccggctggctggtttattgctgataaatctggagccggtgagcgtgggtctcgcggtatcattgcagcactggggccagatggtaagccctcccgtatcgtagttatctacacgacggggagtcaggcaactatggatgaacgaaatagacagatcgctgagataggtgcctcactgattaagcattggtaactgtcagaccaagtttactcatatatactttagattgatttaaaacttcatttttaatttaaaaggatctaggtgaagatcctttttgataatctcatgaccaaaatcccttaacgtgagttttcgttccactgagcgtcagaccccgtagaaaagatcaaaggatcttcttgagatcctttttttctgcgcgtaatctgctgcttgcaaacaaaaaaaccaccgctaccagcggtggtttgtttgccggatcaagagctaccaactctttttccgaaggtaactggcttcagcagagcgcagataccaaatactgttcttctagtgtagccgtagttaggccaccacttcaagaactctgtagcaccgcctacatacctcgctctgctaatcctgttaccagtggctgctgccagtggcgataagtcgtgtcttaccgggttggactcaagacgatagttaccggataaggcgcagcggtcgggctgaacggggggttcgtgcacacagcccagcttggagcgaacgacctacaccgaactgagatacctacagcgtgagctatgagaaagcgccacgcttcccgaagggagaaaggcggacaggtatccggtaagcggcagggtcggaacaggagagcgcacgagggagcttccagggggaaacgcctggtatctttatagtcctgtcgggtttcgccacctctgacttgagcgtcgatttttgtgatgctcgtcaggggggcggagcctatggaaaaacgccagcaacgcggcctttttacggttcctggccttttgctggccttttgctcacatgttctttcctgcgttatcccctgattctgtggataaccgtattaccgcctttgagtgagctgataccgctcgccgcagccgaacgaccgagcgcagcgagtcagtgagcgaggaagcggaagagcgcccaatacgcaaaccgcctctccccgcgcgttggccgattcattaatgcagctggcacgacaggtttcccgactggaaagcgggcagtgagcgcaacgcaattaatgtgagttagctcactcattaggcaccccaggctttacactttatgcttccggctcgtatgttgtgtggaattgtgagcggataacaatttcacacaggaaacagctatgaccatgattacgccagatttaattaag

SEQ ID NO: 58 - DNA, 4746 bp, Artificial Sequence
  Description of Artificial Sequence: Synthetic polynucleotide
gccttaattaggctgcgcgctcgctcgctcactgaggccgcccgggcaaagcccgggcgtcgggcgacctttggtcgcccggcctcagtgagcgagcgagcgcgcagagagggagtggccaactccatcactaggggttccttgtagttaatgattaacccgccatgctacttatctaccagggtaatggggatcctctagaactatagtccacggggttggggttgcgccttttccaaggcagccctgggtttgcgcagggacgcggctgctctgggcgtggttccgggaaacgcagcggcgccgaccctgggtctcgcacattcttcacgtccgttcgcagcgtcacccggatcttcgccgctacccttgtgggccccccggcgacgcttcctcgtccgcccctaagtcgggaaggttccttgcggttcgcggcgtgccggacgtgacaaacggaagccgcacgtctcactagtaccctcgcagacggacagcgccagggagcaatggcagcgcgccgaccgcgatgggctgtggccaatagcggctgctcagcagggcgcgccgagagcagcggccgggaaggggcggtgcgggaggcggggtgtggggcggtagtgtgggccctgttcctgcccgcgcggtgttccgcattctgcaagcctccggagcgcacgtcggcagtcggctccctcgttgaccgaatcaccgacctctctccccacgggagcaagcttgaactgaaaaaccagaaagttaactggtaagtttagtctttttgtcttttatttcaggtcccggatccggtggtggtgcaaatcaaagaactgctcctcagtggatgttgcctttacttctaggcctgtacggaagtgttacttctgctctaaaagctgcggaattgtacccgcggccgatccaccggtatgtggactctgggtcgcagagcggtggcaggcttgctggcatctccgtccccggctcaggcccagaccctgacacgggtgcccaggccggccgagctggctcctctgtgcggccggcgcggccttagaacagacattgacgcaacctgcacccccagaagagccagttccaaccagcgcgggttgaatcagatctggaacgtcaagaagcagagtgtgtaccttatgaatctccggaaaagtggcaccctcggacaccccggatccctcgatgaaaccacttatgagcgcctggccgaggaaaccctggattccctggctgagttcttcgaggacctggctgacaaaccctacaccttcgaagactacgacgtttccttcggaagtggggtgctgacggtcaaacttggtggcgatcttggaacctatgttataaacaagcagactcccaacaaacagatctggctcagctctccaagttcaggacccaagaggtatgactggacgggcaagaattgggtctattctcacgacggagtgagccttcatgaactgttggctgccgaactgacaaaagcccttaagacgaaactggacctgtcctcattggcgtactctggtaaggatgcctaactcgaggacggggtgaactacgcctgaggatccgatctttttccctctgccaaaaattatggggacatcatgaagccccttgagcatctgacttctggctaataaaggaaatttattttcattgcaatagtgtgttggaattttttgtgtctctcactcggaagcaattcgttgatctgaatttcgaccacccataatacccattaccctggtagataagtagcatggcgggttaatcattaactacaaggaacccctagtgatggagttggccactccctctctgcgcgctcgctcgctcactgaggccgggcgaccaaaggtcgcccgacgcccgggctttgcccgggcggcctcagtgagcgagcgagcgcgcagccttaattaacctaattcactggccgtcgttttacaacgtcgtgactgggaaaaccctggcgttacccaacttaatcgccttgcagcacatccccctttcgccagctggcgtaatagcgaagaggcccgcaccgatcgcccttcccaacagttgcgcagcctgaatggcgaatgggacgcgccctgtagcggcgcattaagcgcggcgggtgtggtggttacgcgcagcgtgaccgctacacttgccagcgccctagcgcccgctcctttcgctttcttcccttcctttctcgccacgttcgccggctttccccgtcaagctctaaatcgggggctccctttagggttccgatttagtgctttacggcacctcgaccccaaaaaacttgattagggtgatggttcacgtagtgggccatcgccctgatagacggtttttcgccctttgacgttggagtccacgttctttaatagtggactcttgttccaaactggaacaacactcaaccctatctcggtctattcttttgatttataagggattttgccgatttcggcctattggttaaaaaatgagctgatttaacaaaaatttaacgcgaattttaacaaaatattaacgcttacaatttaggtggcacttttcggggaaatgtgcgcggaacccctatttgtttatttttctaaatacattcaaatatgtatccgctcatgagacaataaccctgataaatgcttcaataatattgaaaaaggaagagtatgagtattcaacatttccgtgtcgcccttattcccttttttgcggcattttgccttcctgtttttgctcacccagaaacgctggtgaaagtaaaagatgctgaagatcagttgggtgcacgagtgggttacatcgaactggatctcaacagcggtaagatccttgagagttttcgccccgaagaacgttttccaatgatgagcacttttaaagttctgctatgtggcgcggtattatcccgtattgacgccgggcaagagcaactcggtcgccgcatacactattctcagaatgacttggttgagtactcaccagtcacagaaaagcatcttacggatggcatgacagtaagagaattatgcagtgctgccataaccatgagtgataacactgcggccaacttacttctgacaacgatcggaggaccgaaggagctaaccgcttttttgcacaacatgggggatcatgtaactcgccttgatcgttgggaaccggagctgaatgaagccataccaaacgacgagcgtgacaccacgatgcctgtagcaatggcaacaacgttgcgcaaactattaactggcgaactacttactctagcttcccggcaacaattaatagactggatggaggcggataaagttgcaggaccacttctgcgctcggcccttccggctggctggtttattgctgataaatctggagccggtgagcgtgggtctcgcggtatcattgcagcactggggccagatggtaagccctcccgtatcgtagttatctacacgacggggagtcaggcaactatggatgaacgaaatagacagatcgctgagataggtgcctcactgattaagcattggtaactgtcagaccaagtttactcatatatactttagattgatttaaaacttcatttttaatttaaaaggatctaggtgaagatcctttttgataatctcatgaccaaaatcccttaacgtgagttttcgttccactgagcgtcagaccccgtagaaaagatcaaaggatcttcttgagatcctttttttctgcgcgtaatctgctgcttgcaaacaaaaaaaccaccgctaccagcggtggtttgtttgccggatcaagagctaccaactctttttccgaaggtaactggcttcagcagagcgcagataccaaatactgttcttctagtgtagccgtagttaggccaccacttcaagaactctgtagcaccgcctacatacctcgctctgctaatcctgttaccagtggctgctgccagtggcgataagtcgtgtcttaccgggttggactcaagacgatagttaccggataaggcgcagcggtcgggctgaacggggggttcgtgcacacagcccagcttggagcgaacgacctacaccgaactgagatacctacagcgtgagctatgagaaagcgccacgcttcccgaagggagaaaggcggacaggtatccggtaagcggcagggtcggaacaggagagcgcacgagggagcttccagggggaaacgcctggtatctttatagtcctgtcgggtttcgccacctctgacttgagcgtcgatttttgtgatgctcgtcaggggggcggagcctatggaaaaacgccagcaacgcggcctttttacggttcctggccttttgctggccttttgctcacatgttctttcctgcgttatcccctgattctgtggataaccgtattaccgcctttgagtgagctgataccgctcgccgcagccgaacgaccgagcgcagcgagtcagtgagcgaggaagcggaagagcgcccaatacgcaaaccgcctctccccgcgcgttggccgattcattaatgcagctggcacgacaggtttcccgactggaaagcgggcagtgagcgcaacgcaattaatgtgagttagctcactcattaggcaccccaggctttacactttatgcttccggctcgtatgttgtgtggaattgtgagcggataacaatttcacacaggaaacagctatgaccatgattacgccagatttaattaag

SEQ ID NO: 59 - DNA, 4746 bp, Artificial Sequence
  Description of Artificial Sequence: Synthetic polynucleotide
gccttaattaggctgcgcgctcgctcgctcactgaggccgcccgggcaaagcccgggcgtcgggcgacctttggtcgcccggcctcagtgagcgagcgagcgcgcagagagggagtggccaactccatcactaggggttccttgtagttaatgattaacccgccatgctacttatctaccagggtaatggggatcctctagaactatagtccacggggttggggttgcgccttttccaaggcagccctgggtttgcgcagggacgcggctgctctgggcgtggttccgggaaacgcagcggcgccgaccctgggtctcgcacattcttcacgtccgttcgcagcgtcacccggatcttcgccgctacccttgtgggccccccggcgacgcttcctcgtccgcccctaagtcgggaaggttccttgcggttcgcggcgtgccggacgtgacaaacggaagccgcacgtctcactagtaccctcgcagacggacagcgccagggagcaatggcagcgcgccgaccgcgatgggctgtggccaatagcggctgctcagcagggcgcgccgagagcagcggccgggaaggggcggtgcgggaggcggggtgtggggcggtagtgtgggccctgttcctgcccgcgcggtgttccgcattctgcaagcctccggagcgcacgtcggcagtcggctccctcgttgaccgaatcaccgacctctctccccacgggagcaagcttgaactgaaaaaccagaaagttaactggtaagtttagtctttttgtcttttatttcaggtcccggatccggtggtggtgcaaatcaaagaactgctcctcagtggatgttgcctttacttctaggcctgtacggaagtgttacttctgctctaaaagctgcggaattgtacccgcggccgatccaccggtatgtggactctggggaggcgcgccgttgccggactcctggcatctccaagcccagcgcaggctcaaaccctcacgcgcgttcccaggccagccgagttggcccccctttgtggcaggcgcggcctgaggacagatatcgacgccacatgcactcctcgccgcgcctccagcaatcaaaggggtttgaaccaaatttggaacgtcaagaagcaatcagtgtatctcatgaatctgagaaagagcggcacactcggtcatcccggaagtctggacgaaaccacatacgaacggctcgccgaggaaacgctggatagcctggccgagtttttcgaggacctggctgataaaccgtatactttcgaagattatgacgtgtcattcgggagcggcgtactgaccgtcaaattgggcggtgacctggggacatacgtgattaacaagcagactcctaataaacagatttggttgagctctccttccagcgggcctaaacgctatgattggacagggaagaattgggtttacagtcacgacggagttagccttcacgagctcttggcagcggagctgacaaaggcgctcaagaccaaactcgacctgtcttcactcgcctattcaggcaaagacgcctgactcgaggacggggtgaactacgcctgaggatccgatctttttccctctgccaaaaattatggggacatcatgaagccccttgagcatctgacttctggctaataaaggaaatttattttcattgcaatagtgtgttggaattttttgtgtctctcactcggaagcaattcgttgatctgaatttcgaccacccataatacccattaccctggtagataagtagcatggcgggttaatcattaactacaaggaacccctagtgatggagttggccactccctctctgcgcgctcgctcgctcactgaggccgggcgaccaaaggtcgcccgacgcccgggctttgcccgggcggcctcagtgagcgagcgagcgcgcagccttaattaacctaattcactggccgtcgttttacaacgtcgtgactgggaaaaccctggcgttacccaacttaatcgccttgcagcacatccccctttcgccagctggcgtaatagcgaagaggcccgcaccgatcgcccttcccaacagttgcgcagcctgaatggcgaatgggacgcgccctgtagcggcgcattaagcgcggcgggtgtggtggttacgcgcagcgtgaccgctacacttgccagcgccctagcgcccgctcctttcgctttcttcccttcctttctcgccacgttcgccggctttccccgtcaagctctaaatcgggggctccctttagggttccgatttagtgctttacggcacctcgaccccaaaaaacttgattagggtgatggttcacgtagtgggccatcgccctgatagacggtttttcgccctttgacgttggagtccacgttctttaatagtggactcttgttccaaactggaacaacactcaaccctatctcggtctattcttttgatttataagggattttgccgatttcggcctattggttaaaaaatgagctgatttaacaaaaatttaacgcgaattttaacaaaatattaacgcttacaatttaggtggcacttttcggggaaatgtgcgcggaacccctatttgtttatttttctaaatacattcaaatatgtatccgctcatgagacaataaccctgataaatgcttcaataatattgaaaaaggaagagtatgagtattcaacatttccgtgtcgcccttattcccttttttgcggcattttgccttcctgtttttgctcacccagaaacgctggtgaaagtaaaagatgctgaagatcagttgggtgcacgagtgggttacatcgaactggatctcaacagcggtaagatccttgagagttttcgccccgaagaacgttttccaatgatgagcacttttaaagttctgctatgtggcgcggtattatcccgtattgacgccgggcaagagcaactcggtcgccgcatacactattctcagaatgacttggttgagtactcaccagtcacagaaaagcatcttacggatggcatgacagtaagagaattatgcagtgctgccataaccatgagtgataacactgcggccaacttacttctgacaacgatcggaggaccgaaggagctaaccgcttttttgcacaacatgggggatcatgtaactcgccttgatcgttgggaaccggagctgaatgaagccataccaaacgacgagcgtgacaccacgatgcctgtagcaatggcaacaacgttgcgcaaactattaactggcgaactacttactctagcttcccggcaacaattaatagactggatggaggcggataaagttgcaggaccacttctgcgctcggcccttccggctggctggtttattgctgataaatctggagccggtgagcgtgggtctcgcggtatcattgcagcactggggccagatggtaagccctcccgtatcgtagttatctacacgacggggagtcaggcaactatggatgaacgaaatagacagatcgctgagataggtgcctcactgattaagcattggtaactgtcagaccaagtttactcatatatactttagattgatttaaaacttcatttttaatttaaaaggatctaggtgaagatcctttttgataatctcatgaccaaaatcccttaacgtgagttttcgttccactgagcgtcagaccccgtagaaaagatcaaaggatcttcttgagatcctttttttctgcgcgtaatctgctgcttgcaaacaaaaaaaccaccgctaccagcggtggtttgtttgccggatcaagagctaccaactctttttccgaaggtaactggcttcagcagagcgcagataccaaatactgttcttctagtgtagccgtagttaggccaccacttcaagaactctgtagcaccgcctacatacctcgctctgctaatcctgttaccagtggctgctgccagtggcgataagtcgtgtcttaccgggttggactcaagacgatagttaccggataaggcgcagcggtcgggctgaacggggggttcgtgcacacagcccagcttggagcgaacgacctacaccgaactgagatacctacagcgtgagctatgagaaagcgccacgcttcccgaagggagaaaggcggacaggtatccggtaagcggcagggtcggaacaggagagcgcacgagggagcttccagggggaaacgcctggtatctttatagtcctgtcgggtttcgccacctctgacttgagcgtcgatttttgtgatgctcgtcaggggggcggagcctatggaaaaacgccagcaacgcggcctttttacggttcctggccttttgctggccttttgctcacatgttctttcctgcgttatcccctgattctgtggataaccgtattaccgcctttgagtgagctgataccgctcgccgcagccgaacgaccgagcgcagcgagtcagtgagcgaggaagcggaagagcgcccaatacgcaaaccgcctctccccgcgcgttggccgattcattaatgcagctggcacgacaggtttcccgactggaaagcgggcagtgagcgcaacgcaattaatgtgagttagctcactcattaggcaccccaggctttacactttatgcttccggctcgtatgttgtgtggaattgtgagcggataacaatttcacacaggaaacagctatgaccatgattacgccagatttaattaag

SEQ ID NO: 60 - DNA, 4746 bp, Artificial Sequence
  Description of Artificial Sequence: Synthetic polynucleotide
gccttaattaggctgcgcgctcgctcgctcactgaggccgcccgggcaaagcccgggcgtcgggcgacctttggtcgcccggcctcagtgagcgagcgagcgcgcagagagggagtggccaactccatcactaggggttccttgtagttaatgattaacccgccatgctacttatctaccagggtaatggggatcctctagaactatagtccacggggttggggttgcgccttttccaaggcagccctgggtttgcgcagggacgcggctgctctgggcgtggttccgggaaacgcagcggcgccgaccctgggtctcgcacattcttcacgtccgttcgcagcgtcacccggatcttcgccgctacccttgtgggccccccggcgacgcttcctcgtccgcccctaagtcgggaaggttccttgcggttcgcggcgtgccggacgtgacaaacggaagccgcacgtctcactagtaccctcgcagacggacagcgccagggagcaatggcagcgcgccgaccgcgatgggctgtggccaatagcggctgctcagcagggcgcgccgagagcagcggccgggaaggggcggtgcgggaggcggggtgtggggcggtagtgtgggccctgttcctgcccgcgcggtgttccgcattctgcaagcctccggagcgcacgtcggcagtcggctccctcgttgaccgaatcaccgacctctctccccacgggagcaagcttgaactgaaaaaccagaaagttaactggtaagtttagtctttttgtcttttatttcaggtcccggatccggtggtggtgcaaatcaaagaactgctcctcagtggatgttgcctttacttctaggcctgtacggaagtgttacttctgctctaaaagctgcggaattgtacccgcggccgatccaccggtatgtggacactcgggcgacgcgccgtggctgggctgcttgcttccccaagtcccgcacaggcgcaaaccctcacaagggtcccacggccagctgaattggccccgctgtgcggtcggaggggcctgcgaacagatatagacgcaacgtgcacccccagaagagcaagcagcaaccagagaggcctcaatcagatttggaacgtcaagaaacagagtgtctatctgatgaacctccgcaaatcagggacccttggtcatccgggatctcttgatgaaacgacctatgaacggctggctgaggagacgcttgactccctggcagagttcttcgaggatctggctgataagccatacacgttcgaggactatgatgtttcttttggttctggcgtcctgacggtgaaactcggaggggatctgggcacttacgttatcaacaaacagactcccaataaacagatttggttgtctagtcctagcagtggcccaaaacgctatgactggacgggcaagaactgggtgtactcccacgatggagttagcctgcacgaacttctggccgctgagcttactaaagcgctgaagactaagctggatctctccagcctcgcatacagcggcaaagacgcctagctcgaggacggggtgaactacgcctgaggatccgatctttttccctctgccaaaaattatggggacatcatgaagccccttgagcatctgacttctggctaataaaggaaatttattttcattgcaatagtgtgttggaattttttgtgtctctcactcggaagcaattcgttgatctgaatttcgaccacccataatacccattaccctggtagataagtagcatggcgggttaatcattaactacaaggaacccctagtgatggagttggccactccctctctgcgcgctcgctcgctcactgaggccgggcgaccaaaggtcgcccgacgcccgggctttgcccgggcggcctcagtgagcgagcgagcgcgcagccttaattaacctaattcactggccgtcgttttacaacgtcgtgactgggaaaaccctggcgttacccaacttaatcgccttgcagcacatccccctttcgccagctggcgtaatagcgaagaggcccgcaccgatcgcccttcccaacagttgcgcagcctgaatggcgaatgggacgcgccctgtagcggcgcattaagcgcggcgggtgtggtggttacgcgcagcgtgaccgctacacttgccagcgccctagcgcccgctcctttcgctttcttcccttcctttctcgccacgttcgccggctttccccgtcaagctctaaatcgggggctccctttagggttccgatttagtgctttacggcacctcgaccccaaaaaacttgattagggtgatggttcacgtagtgggccatcgccctgatagacggtttttcgccctttgacgttggagtccacgttctttaatagtggactcttgttccaaactggaacaacactcaaccctatctcggtctattcttttgatttataagggattttgccgatttcggcctattggttaaaaaatgagctgatttaacaaaaatttaacgcgaattttaacaaaatattaacgcttacaatttaggtggcacttttcggggaaatgtgcgcggaacccctatttgtttatttttctaaatacattcaaatatgtatccgctcatgagacaataaccctgataaatgcttcaataatattgaaaaaggaagagtatgagtattcaacatttccgtgtcgcccttattcccttttttgcggcattttgccttcctgtttttgctcacccagaaacgctggtgaaagtaaaagatgctgaagatcagttgggtgcacgagtgggttacatcgaactggatctcaacagcggtaagatccttgagagttttcgccccgaagaacgttttccaatgatgagcacttttaaagttctgctatgtggcgcggtattatcccgtattgacgccgggcaagagcaactcggtcgccgcatacactattctcagaatgacttggttgagtactcaccagtcacagaaaagcatcttacggatggcatgacagtaagagaattatgcagtgctgccataaccatgagtgataacactgcggccaacttacttctgacaacgatcggaggaccgaaggagctaaccgcttttttgcacaacatgggggatcatgtaactcgccttgatcgttgggaaccggagctgaatgaagccataccaaacgacgagcgtgacaccacgatgcctgtagcaatggcaacaacgttgcgcaaactattaactggcgaactacttactctagcttcccggcaacaattaatagactggatggaggcggataaagttgcaggaccacttctgcgctcggcccttccggctggctggtttattgctgataaatctggagccggtgagcgtgggtctcgcggtatcattgcagcactggggccagatggtaagccctcccgtatcgtagttatctacacgacggggagtcaggcaactatggatgaacgaaatagacagatcgctgagataggtgcctcactgattaagcattggtaactgtcagaccaagtttactcatatatactttagattgatttaaaacttcatttttaatttaaaaggatctaggtgaagatcctttttgataatctcatgaccaaaatcccttaacgtgagttttcgttccactgagcgtcagaccccgtagaaaagatcaaaggatcttcttgagatcctttttttctgcgcgtaatctgctgcttgcaaacaaaaaaaccaccgctaccagcggtggtttgtttgccggatcaagagctaccaactctttttccgaaggtaactggcttcagcagagcgcagataccaaatactgttcttctagtgtagccgtagttaggccaccacttcaagaactctgtagcaccgcctacatacctcgctctgctaatcctgttaccagtggctgctgccagtggcgataagtcgtgtcttaccgggttggactcaagacgatagttaccggataaggcgcagcggtcgggctgaacggggggttcgtgcacacagcccagcttggagcgaacgacctacaccgaactgagatacctacagcgtgagctatgagaaagcgccacgcttcccgaagggagaaaggcggacaggtatccggtaagcggcagggtcggaacaggagagcgcacgagggagcttccagggggaaacgcctggtatctttatagtcctgtcgggtttcgccacctctgacttgagcgtcgatttttgtgatgctcgtcaggggggcggagcctatggaaaaacgccagcaacgcggcctttttacggttcctggccttttgctggccttttgctcacatgttctttcctgcgttatcccctgattctgtggataaccgtattaccgcctttgagtgagctgataccgctcgccgcagccgaacgaccgagcgcagcgagtcagtgagcgaggaagcggaagagcgcccaatacgcaaaccgcctctccccgcgcgttggccgattcattaatgcagctggcacgacaggtttcccgactggaaagcgggcagtgagcgcaacgcaattaatgtgagttagctcactcattaggcaccccaggctttacactttatgcttccggctcgtatgttgtgtggaattgtgagcggataacaatttcacacaggaaacagctatgaccatgattacgccagatttaattaag

SEQ ID NO: 61 - DNA, 4746 bp, Artificial Sequence
  Description of Artificial Sequence: Synthetic polynucleotide
gccttaattaggctgcgcgctcgctcgctcactgaggccgcccgggcaaagcccgggcgtcgggcgacctttggtcgcccggcctcagtgagcgagcgagcgcgcagagagggagtggccaactccatcactaggggttccttgtagttaatgattaacccgccatgctacttatctaccagggtaatggggatcctctagaactatagtccacggggttggggttgcgccttttccaaggcagccctgggtttgcgcagggacgcggctgctctgggcgtggttccgggaaacgcagcggcgccgaccctgggtctcgcacattcttcacgtccgttcgcagcgtcacccggatcttcgccgctacccttgtgggccccccggcgacgcttcctcgtccgcccctaagtcgggaaggttccttgcggttcgcggcgtgccggacgtgacaaacggaagccgcacgtctcactagtaccctcgcagacggacagcgccagggagcaatggcagcgcgccgaccgcgatgggctgtggccaatagcggctgctcagcagggcgcgccgagagcagcggccgggaaggggcggtgcgggaggcggggtgtggggcggtagtgtgggccctgttcctgcccgcgcggtgttccgcattctgcaagcctccggagcgcacgtcggcagtcggctccctcgttgaccgaatcaccgacctctctccccacgggagcaagcttgaactgaaaaaccagaaagttaactggtaagtttagtctttttgtcttttatttcaggtcccggatccggtggtggtgcaaatcaaagaactgctcctcagtggatgttgcctttacttctaggcctgtacggaagtgttacttctgctctaaaagctgcggaattgtacccgcggccgatccaccggtatgtggactctgggtcgacgcgccgtagccggtctcttggcctccccatcccctgcgcaggcacagacccttacacgagttccacggcccgctgaactggcaccactctgcggacgccggggcctgagaaccgatattgacgctacgtgcactccccgacgagcctcttctaatcagagggggctcaaccagatctggaacgtgaagaagcagtcagtctacttgatgaatctgagaaagagcgggacccttgggcaccccgggtctctcgacgagactacatacgagaggctggccgaggagactttggactctctcgccgaattcttcgaggatttggcagacaagccgtacacctttgaagactacgatgtctcattcggatcaggggtgctgacggttaaactggggggcgatctcggaacctacgtcataaacaaacagacacccaataagcagatctggttgtctagcccatcatccggtcctaaacggtacgactggaccggcaagaactgggtctactcccatgacggagtcagtcttcatgaactgcttgccgcagagctgaccaaggctcttaagacgaaactggatctctctagcctggcctactccgggaaggatgcatagctcgaggacggggtgaactacgcctgaggatccgatctttttccctctgccaaaaattatggggacatcatgaagccccttgagcatctgacttctggctaataaaggaaatttattttcattgcaatagtgtgttggaattttttgtgtctctcactcggaagcaattcgttgatctgaatttcgaccacccataatacccattaccctggtagataagtagcatggcgggttaatcattaactacaaggaacccctagtgatggagttggccactccctctctgcgcgctcgctcgctcactgaggccgggcgaccaaaggtcgcccgacgcccgggctttgcccgggcggcctcagtgagcgagcgagcgcgcagccttaattaacctaattcactggccgtcgttttacaacgtcgtgactgggaaaaccctggcgttacccaacttaatcgccttgcagcacatccccctttcgccagctggcgtaatagcgaagaggcccgcaccgatcgcccttcccaacagttgcgcagcctgaatggcgaatgggacgcgccctgtagcggcgcattaagcgcggcgggtgtggtggttacgcgcagcgtgaccgctacacttgccagcgccctagcgcccgctcctttcgctttcttcccttcctttctcgccacgttcgccggctttccccgtcaagctctaaatcgggggctccctttagggttccgatttagtgctttacggcacctcgaccccaaaaaacttgattagggtgatggttcacgtagtgggccatcgccctgatagacggtttttcgccctttgacgttggagtccacgttctttaatagtggactcttgttccaaactggaacaacactcaaccctatctcggtctattcttttgatttataagggattttgccgatttcggcctattggttaaaaaatgagctgatttaacaaaaatttaacgcgaattttaacaaaatattaacgcttacaatttaggtggcacttttcggggaaatgtgcgcggaacccctatttgtttatttttctaaatacattcaaatatgtatccgctcatgagacaataaccctgataaatgcttcaataatattgaaaaaggaagagtatgagtattcaacatttccgtgtcgcccttattcccttttttgcggcattttgccttcctgtttttgctcacccagaaacgctggtgaaagtaaaagatgctgaagatcagttgggtgcacgagtgggttacatcgaactggatctcaacagcggtaagatccttgagagttttcgccccgaagaacgttttccaatgatgagcacttttaaagttctgctatgtggcgcggtattatcccgtattgacgccgggcaagagcaactcggtcgccgcatacactattctcagaatgacttggttgagtactcaccagtcacagaaaagcatcttacggatggcatgacagtaagagaattatgcagtgctgccataaccatgagtgataacactgcggccaacttacttctgacaacgatcggaggaccgaaggagctaaccgcttttttgcacaacatgggggatcatgtaactcgccttgatcgttgggaaccggagctgaatgaagccataccaaacgacgagcgtgacaccacgatgcctgtagcaatggcaacaacgttgcgcaaactattaactggcgaactacttactctagcttcccggcaacaattaatagactggatggaggcggataaagttgcaggaccacttctgcgctcggcccttccggctggctggtttattgctgataaatctggagccggtgagcgtgggtctcgcggtatcattgcagcactggggccagatggtaagccctcccgtatcgtagttatctacacgacggggagtcaggcaactatggatgaacgaaatagacagatcgctgagataggtgcctcactgattaagcattggtaactgtcagaccaagtttactcatatatactttagattgatttaaaacttcatttttaatttaaaaggatctaggtgaagatcctttttgataatctcatgaccaaaatcccttaacgtgagttttcgttccactgagcgtcagaccccgtagaaaagatcaaaggatcttcttgagatcctttttttctgcgcgtaatctgctgcttgcaaacaaaaaaaccaccgctaccagcggtggtttgtttgccggatcaagagctaccaactctttttccgaaggtaactggcttcagcagagcgcagataccaaatactgttcttctagtgtagccgtagttaggccaccacttcaagaactctgtagcaccgcctacatacctcgctctgctaatcctgttaccagtggctgctgccagtggcgataagtcgtgtcttaccgggttggactcaagacgatagttaccggataaggcgcagcggtcgggctgaacggggggttcgtgcacacagcccagcttggagcgaacgacctacaccgaactgagatacctacagcgtgagctatgagaaagcgccacgcttcccgaagggagaaaggcggacaggtatccggtaagcggcagggtcggaacaggagagcgcacgagggagcttccagggggaaacgcctggtatctttatagtcctgtcgggtttcgccacctctgacttgagcgtcgatttttgtgatgctcgtcaggggggcggagcctatggaaaaacgccagcaacgcggcctttttacggttcctggccttttgctggccttttgctcacatgttctttcctgcgttatcccctgattctgtggataaccgtattaccgcctttgagtgagctgataccgctcgccgcagccgaacgaccgagcgcagcgagtcagtgagcgaggaagcggaagagcgcccaatacgcaaaccgcctctccccgcgcgttggccgattcattaatgcagctggcacgacaggtttcccgactggaaagcgggcagtgagcgcaacgcaattaatgtgagttagctcactcattaggcaccccaggctttacactttatgcttccggctcgtatgttgtgtggaattgtgagcggataacaatttcacacaggaaacagctatgaccatgattacgccagatttaattaag

SEQ ID NO: 62 - DNA, 4550 bp, Artificial Sequence
  Description of Artificial Sequence: Synthetic polynucleotide
gccttaattaggctgcgcgctcgctcgctcactgaggccgcccgggcaaagcccgggcgtcgggcgacctttggtcgcccggcctcagtgagcgagcgagcgcgcagagagggagtggccaactccatcactaggggttccttgtagttaatgattaacccgccatgctacttatctaccagggtaatggggatcctctagaactatagctagtcgacggtgtggaaagtccccaggctccccagcaggcagaagtatgcaaagcatgcatctcaattagtcagcaaccaggtgtggaaagtccccaggctccccagcaggcagaagtatgcaaagcatgcatctcaattagtcagcaaccatagtcccgcccctaactccgcccatcccgcccctaactccgcccagttccgcccattctccgccccatggctgactaattttttttatttatgcagaggccgaggccgcctcggcctctgagctattccagaagtagtgaggaggcttttttggaggcctaggcttttgcaaaaagcttgaactgaaaaaccagaaagttaactggtaagtttagtctttttgtcttttatttcaggtcccggatccggtggtggtgcaaatcaaagaactgctcctcagtggatgttgcctttacttctaggcctgtacggaagtgttacttctgctctaaaagctgcggaattgtacccgcggccgatccaccggtatgtggactctcgggcgccgcgcagtagccggcctcctggcgtcacccagcccagcccaggcccagaccctcacccgggtcccgcggccggcagagttggccccactctgcggccgccgtggcctgcgcaccgacatcgatgcgacctgcacgccccgccgcgcaagttcgaaccaacgtggcctcaaccagatttggaatgtcaaaaagcagagtgtctatttgatgaatttgaggaaatctggaactttgggccacccaggctctctagatgagaccacctatgaaagactagcagaggaaacgctggactctttagcagagttttttgaagaccttgcagacaagccatacacgtttgaggactatgatgtctcctttgggagtggtgtcttaactgtcaaactgggtggagatctaggaacctatgtgatcaacaagcagacgccaaacaagcaaatctggctatcttctccatccagtggacctaagcgttatgactggactgggaaaaactgggtgtactcccacgacggcgtgtccctccatgagctgctggccgcagagctcactaaagccttaaaaaccaaactggacttgtcttccttggcctattccggaaaagatgcttgactcgaggacggggtgaactacgcctgaggatccgatctttttccctctgccaaaaattatggggacatcatgaagccccttgagcatctgacttctggctaataaaggaaatttattttcattgcaatagtgtgttggaattttttgtgtctctcactcggaagcaattcgttgatctgaatttcgaccacccataatacccattaccctggtagataagtagcatggcgggttaatcattaactacaaggaacccctagtgatggagttggccactccctctctgcgcgctcgctcgctcactgaggccgggcgaccaaaggtcgcccgacgcccgggctttgcccgggcggcctcagtgagcgagcgagcgcgcagccttaattaacctaattcactggccgtcgttttacaacgtcgtgactgggaaaaccctggcgttacccaacttaatcgccttgcagcacatccccctttcgccagctggcgtaatagcgaagaggcccgcaccgatcgcccttcccaacagttgcgcagcctgaatggcgaatgggacgcgccctgtagcggcgcattaagcgcggcgggtgtggtggttacgcgcagcgtgaccgctacacttgccagcgccctagcgcccgctcctttcgctttcttcccttcctttctcgccacgttcgccggctttccccgtcaagctctaaatcgggggctccctttagggttccgatttagtgctttacggcacctcgaccccaaaaaacttgattagggtgatggttcacgtagtgggccatcgccctgatagacggtttttcgccctttgacgttggagtccacgttctttaatagtggactcttgttccaaactggaacaacactcaaccctatctcggtctattcttttgatttataagggattttgccgatttcggcctattggttaaaaaatgagctgatttaacaaaaatttaacgcgaattttaacaaaatattaacgcttacaatttaggtggcacttttcggggaaatgtgcgcggaacccctatttgtttatttttctaaatacattcaaatatgtatccgctcatgagacaataaccctgataaatgcttcaataatattgaaaaaggaagagtatgagtattcaacatttccgtgtcgcccttattcccttttttgcggcattttgccttcctgtttttgctcacccagaaacgctggtgaaagtaaaagatgctgaagatcagttgggtgcacgagtgggttacatcgaactggatctcaacagcggtaagatccttgagagttttcgccccgaagaacgttttccaatgatgagcacttttaaagttctgctatgtggcgcggtattatcccgtattgacgccgggcaagagcaactcggtcgccgcatacactattctcagaatgacttggttgagtactcaccagtcacagaaaagcatcttacggatggcatgacagtaagagaattatgcagtgctgccataaccatgagtgataacactgcggccaacttacttctgacaacgatcggaggaccgaaggagctaaccgcttttttgcacaacatgggggatcatgtaactcgccttgatcgttgggaaccggagctgaatgaagccataccaaacgacgagcgtgacaccacgatgcctgtagcaatggcaacaacgttgcgcaaactattaactggcgaactacttactctagcttcccggcaacaattaatagactggatggaggcggataaagttgcaggaccacttctgcgctcggcccttccggctggctggtttattgctgataaatctggagccggtgagcgtgggtctcgcggtatcattgcagcactggggccagatggtaagccctcccgtatcgtagttatctacacgacggggagtcaggcaactatggatgaacgaaatagacagatcgctgagataggtgcctcactgattaagcattggtaactgtcagaccaagtttactcatatatactttagattgatttaaaacttcatttttaatttaaaaggatctaggtgaagatcctttttgataatctcatgaccaaaatcccttaacgtgagttttcgttccactgagcgtcagaccccgtagaaaagatcaaaggatcttcttgagatcctttttttctgcgcgtaatctgctgcttgcaaacaaaaaaaccaccgctaccagcggtggtttgtttgccggatcaagagctaccaactctttttccgaaggtaactggcttcagcagagcgcagataccaaatactgttcttctagtgtagccgtagttaggccaccacttcaagaactctgtagcaccgcctacatacctcgctctgctaatcctgttaccagtggctgctgccagtggcgataagtcgtgtcttaccgggttggactcaagacgatagttaccggataaggcgcagcggtcgggctgaacggggggttcgtgcacacagcccagcttggagcgaacgacctacaccgaactgagatacctacagcgtgagctatgagaaagcgccacgcttcccgaagggagaaaggcggacaggtatccggtaagcggcagggtcggaacaggagagcgcacgagggagcttccagggggaaacgcctggtatctttatagtcctgtcgggtttcgccacctctgacttgagcgtcgatttttgtgatgctcgtcaggggggcggagcctatggaaaaacgccagcaacgcggcctttttacggttcctggccttttgctggccttttgctcacatgttctttcctgcgttatcccctgattctgtggataaccgtattaccgcctttgagtgagctgataccgctcgccgcagccgaacgaccgagcgcagcgagtcagtgagcgaggaagcggaagagcgcccaatacgcaaaccgcctctccccgcgcgttggccgattcattaatgcagctggcacgacaggtttcccgactggaaagcgggcagtgagcgcaacgcaattaatgtgagttagctcactcattaggcaccccaggctttacactttatgcttccggctcgtatgttgtgtggaattgtgagcggataacaatttcacacaggaaacagctatgaccatgattacgccagatttaattaag

SEQ ID NO: 63 - DNA, 4824 bp, Artificial Sequence
  Description of Artificial Sequence: Synthetic polynucleotide
ctgcgcgctcgctcgctcactgaggccgcccgggcaaagcccgggcgtcgggcgacctttggtcgcccggcctcagtgagcgagcgagcgcgcagagagggagtgtagccatgctctaggaagatcaattcaattcacgcgtcgacattgattattgactagttattaatagtaatcaattacggggtcattagttcatagcccatatatggagttccgcgttacataacttacggtaaatggcccgcctggctgaccgcccaacgacccccgcccattgacgtcaataatgacgtatgttcccatagtaacgccaatagggactttccattgacgtcaatgggtggagtatttacggtaaactgcccacttggcagtacatcaagtgtatcatatgccaagtacgccccctattgacgtcaatgacggtaaatggcccgcctggcattatgcccagtacatgaccttatgggactttcctacttggcagtacatctacgtattagtcatcgctattaccatgtcgaggccacgttctgcttcactctccccatctcccccccctccccacccccaattttgtatttatttattttttaattattttgtgcagcgatgggggcggggggggggggcgcgcgccaggcggggcggggcggggcgaggggcggggcggggcgaggcggagaggtgcggcggcagccaatcagagcggcgcgctccgaaagtttccttttatggcgaggcggcggcggcggcggccctataaaaagcgaagcgcgcggcgggcgggagcaagcttgaactgaaaaaccagaaagttaactggtaagtttagtctttttgtcttttatttcaggtcccggatccggtggtggtgcaaatcaaagaactgctcctcagtggatgttgcctttacttctaggcctgtacggaagtgttacttctgctctaaaagctgcggaattgtacccgcggccgatccaccggtatgtggactctcgggcgccgcgcagtagccggcctcctggcgtcacccagcccagcccaggcccagaccctcacccgggtcccgcggccggcagagttggccccactctgcggccgccgtggcctgcgcaccgacatcgatgcgacctgcacgccccgccgcgcaagttcgaaccaacgtggcctcaaccagatttggaatgtcaaaaagcagagtgtctatttgatgaatttgaggaaatctggaactttgggccacccaggctctctagatgagaccacctatgaaagactagcagaggaaacgctggactctttagcagagttttttgaagaccttgcagacaagccatacacgtttgaggactatgatgtctcctttgggagtggtgtcttaactgtcaaactgggtggagatctaggaacctatgtgatcaacaagcagacgccaaacaagcaaatctggctatcttctccatccagtggacctaagcgttatgactggactgggaaaaactgggtgtactcccacgacggcgtgtccctccatgagctgctggccgcagagctcactaaagccttaaaaaccaaactggacttgtcttccttggcctattccggaaaagatgcttgagcggccctagcgtttaaacgggccctctagagtcgacccgggcggcctcgaggacggggtgaactacgcctgaggatccgatctttttccctctgccaaaaattatggggacatcatgaagccccttgagcatctgacttctggctaataaaggaaatttattttcattgcaatagtgtgttggaattttttgtgtctctcactcggcctaggtagataagtagcatggcgggttaatcattaactacaaggaacccctagtgatggagttggccactccctctctgcgcgctcgctcgctcactgaggccgggcgaccaaaggtcgcccgacgcccgggctttgcccgggcggcctcagtgagcgagcgagcgcgcagccttaattaacctaattcactggccgtcgttttacaacgtcgtgactgggaaaaccctggcgttacccaacttaatcgccttgcagcacatccccctttcgccagctggcgtaatagcgaagaggcccgcaccgatcgcccttcccaacagttgcgcagcctgaatggcgaatgggacgcgccctgtagcggcgcattaagcgcggcgggtgtggtggttacgcgcagcgtgaccgctacacttgccagcgccctagcgcccgctcctttcgctttcttcccttcctttctcgccacgttcgccggctttccccgtcaagctctaaatcgggggctccctttagggttccgatttagtgctttacggcacctcgaccccaaaaaacttgattagggtgatggttcacgtagtgggccatcgccctgatagacggtttttcgccctttgacgttggagtccacgttctttaatagtggactcttgttccaaactggaacaacactcaaccctatctcggtctattcttttgatttataagggattttgccgatttcggcctattggttaaaaaatgagctgatttaacaaaaatttaacgcgaattttaacaaaatattaacgcttacaatttaggtggcacttttcggggaaatgtgcgcggaacccctatttgtttatttttctaaatacattcaaatatgtatccgctcatgagacaataaccctgataaatgcttcaataatattgaaaaaggaagagtatgagtattcaacatttccgtgtcgcccttattcccttttttgcggcattttgccttcctgtttttgctcacccagaaacgctggtgaaagtaaaagatgctgaagatcagttgggtgcacgagtgggttacatcgaactggatctcaacagcggtaagatccttgagagttttcgccccgaagaacgttttccaatgatgagcacttttaaagttctgctatgtggcgcggtattatcccgtattgacgccgggcaagagcaactcggtcgccgcatacactattctcagaatgacttggttgagtactcaccagtcacagaaaagcatcttacggatggcatgacagtaagagaattatgcagtgctgccataaccatgagtgataacactgcggccaacttacttctgacaacgatcggaggaccgaaggagctaaccgcttttttgcacaacatgggggatcatgtaactcgccttgatcgttgggaaccggagctgaatgaagccataccaaacgacgagcgtgacaccacgatgcctgtagcaatggcaacaacgttgcgcaaactattaactggcgaactacttactctagcttcccggcaacaattaatagactggatggaggcggataaagttgcaggaccacttctgcgctcggcccttccggctggctggtttattgctgataaatctggagccggtgagcgtgggtctcgcggtatcattgcagcactggggccagatggtaagccctcccgtatcgtagttatctacacgacggggagtcaggcaactatggatgaacgaaatagacagatcgctgagataggtgcctcactgattaagcattggtaactgtcagaccaagtttactcatatatactttagattgatttaaaacttcatttttaatttaaaaggatctaggtgaagatcctttttgataatctcatgaccaaaatcccttaacgtgagttttcgttccactgagcgtcagaccccgtagaaaagatcaaaggatcttcttgagatcctttttttctgcgcgtaatctgctgcttgcaaacaaaaaaaccaccgctaccagcggtggtttgtttgccggatcaagagctaccaactctttttccgaaggtaactggcttcagcagagcgcagataccaaatactgttcttctagtgtagccgtagttaggccaccacttcaagaactctgtagcaccgcctacatacctcgctctgctaatcctgttaccagtggctgctgccagtggcgataagtcgtgtcttaccgggttggactcaagacgatagttaccggataaggcgcagcggtcgggctgaacggggggttcgtgcacacagcccagcttggagcgaacgacctacaccgaactgagatacctacagcgtgagctatgagaaagcgccacgcttcccgaagggagaaaggcggacaggtatccggtaagcggcagggtcggaacaggagagcgcacgagggagcttccagggggaaacgcctggtatctttatagtcctgtcgggtttcgccacctctgacttgagcgtcgatttttgtgatgctcgtcaggggggcggagcctatggaaaaacgccagcaacgcggcctttttacggttcctggccttttgctggccttttgctcacatgttctttcctgcgttatcccctgattctgtggataaccgtattaccgcctttgagtgagctgataccgctcgccgcagccgaacgaccgagcgcagcgagtcagtgagcgaggaagcggaagagcgcccaatacgcaaaccgcctctccccgcgcgttggccgattcattaatgcagctggcacgacaggtttcccgactggaaagcgggcagtgagcgcaacgcaattaatgtgagttagctcactcattaggcaccccaggctttacactttatgcttccggctcgtatgttgtgtggaattgtgagcggataacaatttcacacaggaaacagctatgaccatgattacgccagatttaattaaggccttaattagg

SEQ ID NO: 64 - DNA, 4805 bp, Artificial Sequence
  Description of Artificial Sequence: Synthetic polynucleotide
ctgcgcgctcgctcgctcactgaggccgcccgggcaaagcccgggcgtcgggcgacctttggtcgcccggcctcagtgagcgagcgagcgcgcagagagggagtgtagccatgctctaggaagatcaattcaattcacgcgtcgacattgattattgactagttattaatagtaatcaattacggggtcattagttcatagcccatatatggagttccgcgttacataacttacggtaaatggcccgcctggctgaccgcccaacgacccccgcccattgacgtcaataatgacgtatgttcccatagtaacgccaatagggactttccattgacgtcaatgggtggagtatttacggtaaactgcccacttggcagtacatcaagtgtatcatatgccaagtacgccccctattgacgtcaatgacggtaaatggcccgcctggcattatgcccagtacatgaccttatgggactttcctacttggcagtacatctacgtattagtcatcgctattaccatgtcgaggccacgttctgcttcactctccccatctcccccccctccccacccccaattttgtatttatttattttttaattattttgtgcagcgatgggggcggggggggggggcgcgcgccaggcggggcggggcggggcgaggggcggggcggggcgaggcggagaggtgcggcggcagccaatcagagcggcgcgctccgaaagtttccttttatggcgaggcggcggcggcggcggccctataaaaagcgaagcgcgcggcgggcgggagcaagcttgaactgaaaaaccagaaagttaactggtaagtttagtctttttgtcttttatttcaggtcccggatccggtggtggtgcaaatcaaagaactgctcctcagtggatgttgcctttacttctaggcctgtacggaagtgttacttctgctctaaaagctgcggaattgtacccgcggccgatccaccggtatgtggactctcgggcgccgcgcagtagccggcctcctggcgtcacccagcccagcccaggcccagaccctcacccgggtcccgcggccggcagagttggccccactctgcggccgccgtggcctgcgcaccgacatcgatgcgacctgcacgccccgccgcgcaagttcgaaccaacgtggcctcaaccagatttggaatgtcaaaaagcagagtgtctatttgatgaatttgaggaaatctggaactttgggccacccaggctctctagatgagaccacctatgaaagactagcagaggaaacgctggactctttagcagagttttttgaagaccttgcagacaagccatacacgtttgaggactatgatgtctcctttgggagtggtgtcttaactgtcaaactgggtggagatctaggaacctatgtgatcaacaagcagacgccaaacaagcaaatctggctatcttctccatccagtggacctaagcgttatgactggactgggaaaaactgggtgtactcccacgacggcgtgtccctccatgagctgctggccgcagagctcactaaagccttaaaaaccaaactggacttgtcttccttggcctattccggaaaagatgcttatccttatgacgtgcctgactatgcctgactcgaggacggggtgaactacgcctgaggatccgatctttttccctctgccaaaaattatggggacatcatgaagccccttgagcatctgacttctggctaataaaggaaatttattttcattgcaatagtgtgttggaattttttgtgtctctcactcggcctaggtagataagtagcatggcgggttaatcattaactacaaggaacccctagtgatggagttggccactccctctctgcgcgctcgctcgctcactgaggccgggcgaccaaaggtcgcccgacgcccgggctttgcccgggcggcctcagtgagcgagcgagcgcgcagccttaattaacctaattcactggccgtcgttttacaacgtcgtgactgggaaaaccctggcgttacccaacttaatcgccttgcagcacatccccctttcgccagctggcgtaatagcgaagaggcccgcaccgatcgcccttcccaacagttgcgcagcctgaatggcgaatgggacgcgccctgtagcggcgcattaagcgcggcgggtgtggtggttacgcgcagcgtgaccgctacacttgccagcgccctagcgcccgctcctttcgctttcttcccttcctttctcgccacgttcgccggctttccccgtcaagctctaaatcgggggctccctttagggttccgatttagtgctttacggcacctcgaccccaaaaaacttgattagggtgatggttcacgtagtgggccatcgccctgatagacggtttttcgccctttgacgttggagtccacgttctttaatagtggactcttgttccaaactggaacaacactcaaccctatctcggtctattcttttgatttataagggattttgccgatttcggcctattggttaaaaaatgagctgatttaacaaaaatttaacgcgaattttaacaaaatattaacgcttacaatttaggtggcacttttcggggaaatgtgcgcggaacccctatttgtttatttttctaaatacattcaaatatgtatccgctcatgagacaataaccctgataaatgcttcaataatattgaaaaaggaagagtatgagtattcaacatttccgtgtcgcccttattcccttttttgcggcattttgccttcctgtttttgctcacccagaaacgctggtgaaagtaaaagatgctgaagatcagttgggtgcacgagtgggttacatcgaactggatctcaacagcggtaagatccttgagagttttcgccccgaagaacgttttccaatgatgagcacttttaaagttctgctatgtggcgcggtattatcccgtattgacgccgggcaagagcaactcggtcgccgcatacactattctcagaatgacttggttgagtactcaccagtcacagaaaagcatcttacggatggcatgacagtaagagaattatgcagtgctgccataaccatgagtgataacactgcggccaacttacttctgacaacgatcggaggaccgaaggagctaaccgcttttttgcacaacatgggggatcatgtaactcgccttgatcgttgggaaccggagctgaatgaagccataccaaacgacgagcgtgacaccacgatgcctgtagcaatggcaacaacgttgcgcaaactattaactggcgaactacttactctagcttcccggcaacaattaatagactggatggaggcggataaagttgcaggaccacttctgcgctcggcccttccggctggctggtttattgctgataaatctggagccggtgagcgtgggtctcgcggtatcattgcagcactggggccagatggtaagccctcccgtatcgtagttatctacacgacggggagtcaggcaactatggatgaacgaaatagacagatcgctgagataggtgcctcactgattaagcattggtaactgtcagaccaagtttactcatatatactttagattgatttaaaacttcatttttaatttaaaaggatctaggtgaagatcctttttgataatctcatgaccaaaatcccttaacgtgagttttcgttccactgagcgtcagaccccgtagaaaagatcaaaggatcttcttgagatcctttttttctgcgcgtaatctgctgcttgcaaacaaaaaaaccaccgctaccagcggtggtttgtttgccggatcaagagctaccaactctttttccgaaggtaactggcttcagcagagcgcagataccaaatactgttcttctagtgtagccgtagttaggccaccacttcaagaactctgtagcaccgcctacatacctcgctctgctaatcctgttaccagtggctgctgccagtggcgataagtcgtgtcttaccgggttggactcaagacgatagttaccggataaggcgcagcggtcgggctgaacggggggttcgtgcacacagcccagcttggagcgaacgacctacaccgaactgagatacctacagcgtgagctatgagaaagcgccacgcttcccgaagggagaaaggcggacaggtatccggtaagcggcagggtcggaacaggagagcgcacgagggagcttccagggggaaacgcctggtatctttatagtcctgtcgggtttcgccacctctgacttgagcgtcgatttttgtgatgctcgtcaggggggcggagcctatggaaaaacgccagcaacgcggcctttttacggttcctggccttttgctggccttttgctcacatgttctttcctgcgttatcccctgattctgtggataaccgtattaccgcctttgagtgagctgataccgctcgccgcagccgaacgaccgagcgcagcgagtcagtgagcgaggaagcggaagagcgcccaatacgcaaaccgcctctccccgcgcgttggccgattcattaatgcagctggcacgacaggtttcccgactggaaagcgggcagtgagcgcaacgcaattaatgtgagttagctcactcattaggcaccccaggctttacactttatgcttccggctcgtatgttgtgtggaattgtgagcggataacaatttcacacaggaaacagctatgaccatgattacgccagatttaattaaggccttaattagg

SEQ ID NO: 65 - DNA, 4850 bp, Artificial Sequence
  Description of Artificial Sequence: Synthetic polynucleotide
ctgcgcgctcgctcgctcactgaggccgcccgggcaaagcccgggcgtcgggcgacctttggtcgcccggcctcagtgagcgagcgagcgcgcagagagggagtgtagccatgctctaggaagatcaattcaattcacgcgtcgacattgattattgactagttattaatagtaatcaattacggggtcattagttcatagcccatatatggagttccgcgttacataacttacggtaaatggcccgcctggctgaccgcccaacgacccccgcccattgacgtcaataatgacgtatgttcccatagtaacgccaatagggactttccattgacgtcaatgggtggagtatttacggtaaactgcccacttggcagtacatcaagtgtatcatatgccaagtacgccccctattgacgtcaatgacggtaaatggcccgcctggcattatgcccagtacatgaccttatgggactttcctacttggcagtacatctacgtattagtcatcgctattaccatgtcgaggccacgttctgcttcactctccccatctcccccccctccccacccccaattttgtatttatttattttttaattattttgtgcagcgatgggggcggggggggggggcgcgcgccaggcggggcggggcggggcgaggggcggggcggggcgaggcggagaggtgcggcggcagccaatcagagcggcgcgctccgaaagtttccttttatggcgaggcggcggcggcggcggccctataaaaagcgaagcgcgcggcgggcgggagcaagcttgaactgaaaaaccagaaagttaactggtaagtttagtctttttgtcttttatttcaggtcccggatccggtggtggtgcaaatcaaagaactgctcctcagtggatgttgcctttacttctaggcctgtacggaagtgttacttctgctctaaaagctgcggaattgtacccgcggccgatccaccggtatgtggactctcgggcgccgcgcagtagccggcctcctggcgtcacccagcccagcccaggcccagaccctcacccgggtcccgcggccggcagagttggccccactctgcggccgccgtggcctgcgcaccgacatcgatgcgacctgcacgccccgccgcgcaagttcgaaccaacgtggcctcaaccagatttggaatgtcaaaaagcagagtgtctatttgatgaatttgaggaaatctggaactttgggccacccaggctctctagatgagaccacctatgaaagactagcagaggaaacgctggactctttagcagagttttttgaagaccttgcagacaagccatacacgtttgaggactatgatgtctcctttgggagtggtgtcttaactgtcaaactgggtggagatctaggaacctatgtgatcaacaagcagacgccaaacaagcaaatctggctatcttctccatccagtggacctaagcgttatgactggactgggaaaaactgggtgtactcccacgacggcgtgtccctccatgagctgctggccgcagagctcactaaagccttaaaaaccaaactggacttgtcttccttggcctattccggaaaagatgctggatccgactacaaagaccatgacggtgattataaagatcatgacatcgactacaaggatgacgatgacaagtagctcgaggacggggtgaactacgcctgaggatccgatctttttccctctgccaaaaattatggggacatcatgaagccccttgagcatctgacttctggctaataaaggaaatttattttcattgcaatagtgtgttggaattttttgtgtctctcactcggcctaggtagataagtagcatggcgggttaatcattaactacaaggaacccctagtgatggagttggccactccctctctgcgcgctcgctcgctcactgaggccgggcgaccaaaggtcgcccgacgcccgggctttgcccgggcggcctcagtgagcgagcgagcgcgcagccttaattaacctaattcactggccgtcgttttacaacgtcgtgactgggaaaaccctggcgttacccaacttaatcgccttgcagcacatccccctttcgccagctggcgtaatagcgaagaggcccgcaccgatcgcccttcccaacagttgcgcagcctgaatggcgaatgggacgcgccctgtagcggcgcattaagcgcggcgggtgtggtggttacgcgcagcgtgaccgctacacttgccagcgccctagcgcccgctcctttcgctttcttcccttcctttctcgccacgttcgccggctttccccgtcaagctctaaatcgggggctccctttagggttccgatttagtgctttacggcacctcgaccccaaaaaacttgattagggtgatggttcacgtagtgggccatcgccctgatagacggtttttcgccctttgacgttggagtccacgttctttaatagtggactcttgttccaaactggaacaacactcaaccctatctcggtctattcttttgatttataagggattttgccgatttcggcctattggttaaaaaatgagctgatttaacaaaaatttaacgcgaattttaacaaaatattaacgcttacaatttaggtggcacttttcggggaaatgtgcgcggaacccctatttgtttatttttctaaatacattcaaatatgtatccgctcatgagacaataaccctgataaatgcttcaataatattgaaaaaggaagagtatgagtattcaacatttccgtgtcgcccttattcccttttttgcggcattttgccttcctgtttttgctcacccagaaacgctggtgaaagtaaaagatgctgaagatcagttgggtgcacgagtgggttacatcgaactggatctcaacagcggtaagatccttgagagttttcgccccgaagaacgttttccaatgatgagcacttttaaagttctgctatgtggcgcggtattatcccgtattgacgccgggcaagagcaactcggtcgccgcatacactattctcagaatgacttggttgagtactcaccagtcacagaaaagcatcttacggatggcatgacagtaagagaattatgcagtgctgccataaccatgagtgataacactgcggccaacttacttctgacaacgatcggaggaccgaaggagctaaccgcttttttgcacaacatgggggatcatgtaactcgccttgatcgttgggaaccggagctgaatgaagccataccaaacgacgagcgtgacaccacgatgcctgtagcaatggcaacaacgttgcgcaaactattaactggcgaactacttactctagcttcccggcaacaattaatagactggatggaggcggataaagttgcaggaccacttctgcgctcggcccttccggctggctggtttattgctgataaatctggagccggtgagcgtgggtctcgcggtatcattgcagcactggggccagatggtaagccctcccgtatcgtagttatctacacgacggggagtcaggcaactatggatgaacgaaatagacagatcgctgagataggtgcctcactgattaagcattggtaactgtcagaccaagtttactcatatatactttagattgatttaaaacttcatttttaatttaaaaggatctaggtgaagatcctttttgataatctcatgaccaaaatcccttaacgtgagttttcgttccactgagcgtcagaccccgtagaaaagatcaaaggatcttcttgagatcctttttttctgcgcgtaatctgctgcttgcaaacaaaaaaaccaccgctaccagcggtggtttgtttgccggatcaagagctaccaactctttttccgaaggtaactggcttcagcagagcgcagataccaaatactgttcttctagtgtagccgtagttaggccaccacttcaagaactctgtagcaccgcctacatacctcgctctgctaatcctgttaccagtggctgctgccagtggcgataagtcgtgtcttaccgggttggactcaagacgatagttaccggataaggcgcagcggtcgggctgaacggggggttcgtgcacacagcccagcttggagcgaacgacctacaccgaactgagatacctacagcgtgagctatgagaaagcgccacgcttcccgaagggagaaaggcggacaggtatccggtaagcggcagggtcggaacaggagagcgcacgagggagcttccagggggaaacgcctggtatctttatagtcctgtcgggtttcgccacctctgacttgagcgtcgatttttgtgatgctcgtcaggggggcggagcctatggaaaaacgccagcaacgcggcctttttacggttcctggccttttgctggccttttgctcacatgttctttcctgcgttatcccctgattctgtggataaccgtattaccgcctttgagtgagctgataccgctcgccgcagccgaacgaccgagcgcagcgagtcagtgagcgaggaagcggaagagcgcccaatacgcaaaccgcctctccccgcgcgttggccgattcattaatgcagctggcacgacaggtttcccgactggaaagcgggcagtgagcgcaacgcaattaatgtgagttagctcactcattaggcaccccaggctttacactttatgcttccggctcgtatgttgtgtggaattgtgagcggataacaatttcacacaggaaacagctatgaccatgattacgccagatttaattaaggccttaattagg

SEQ ID NO: 66 - DNA, 4886 bp, Artificial Sequence
  Description of Artificial Sequence: Synthetic polynucleotide
ctgcgcgctcgctcgctcactgaggccgcccgggcaaagcccgggcgtcgggcgacctttggtcgcccggcctcagtgagcgagcgagcgcgcagagagggagtgtagccatgctctaggaagatcaattcaattcacgcgtcgacattgattattgactagttattaatagtaatcaattacggggtcattagttcatagcccatatatggagttccgcgttacataacttacggtaaatggcccgcctggctgaccgcccaacgacccccgcccattgacgtcaataatgacgtatgttcccatagtaacgccaatagggactttccattgacgtcaatgggtggagtatttacggtaaactgcccacttggcagtacatcaagtgtatcatatgccaagtacgccccctattgacgtcaatgacggtaaatggcccgcctggcattatgcccagtacatgaccttatgggactttcctacttggcagtacatctacgtattagtcatcgctattaccatgtcgaggccacgttctgcttcactctccccatctcccccccctccccacccccaattttgtatttatttattttttaattattttgtgcagcgatgggggcggggggggggggcgcgcgccaggcggggcggggcggggcgaggggcggggcggggcgaggcggagaggtgcggcggcagccaatcagagcggcgcgctccgaaagtttccttttatggcgaggcggcggcggcggcggccctataaaaagcgaagcgcgcggcgggcgggagcaagcttgaactgaaaaaccagaaagttaactggtaagtttagtctttttgtcttttatttcaggtcccggatccggtggtggtgcaaatcaaagaactgctcctcagtggatgttgcctttacttctaggcctgtacggaagtgttacttctgctctaaaagctgcggaattgtacccgcggccgatccaccggtatgtggactctcgggcgccgcgcagtagccggcctcctggcgtcacccagcccagcccaggcccagaccctcacccgggtcccgcggccggcagagttggccccactctgcggccgccgtggcctgcgcaccgacatcgatgcgacctgcacgccccgccgcgcaagttcgaaccaacgtggcctcaaccagatttggaatgtcaaaaagcagagtgtctatttgatgaatttgaggaaatctggaactttgggccacccaggctctctagatgagaccacctatgaaagactagcagaggaaacgctggactctttagcagagttttttgaagaccttgcagacaagccatacacgtttgaggactatgatgtctcctttgggagtggtgtcttaactgtcaaactgggtggagatctaggaacctatgtgatcaacaagcagacgccaaacaagcaaatctggctatcttctccatccagtggacctaagcgttatgactggactgggaaaaactgggtgtactcccacgacggcgtgtccctccatgagctgctggccgcagagctcactaaagccttaaaaaccaaactggacttgtcttccttggcctattccggaaaagatgctggatccgaacaaaaactcatctcagaagaggatctgggatccgactacaaagaccatgacggtgattataaagatcatgacatcgactacaaggatgacgatgacaagtagctcgaggacggggtgaactacgcctgaggatccgatctttttccctctgccaaaaattatggggacatcatgaagccccttgagcatctgacttctggctaataaaggaaatttattttcattgcaatagtgtgttggaattttttgtgtctctcactcggcctaggtagataagtagcatggcgggttaatcattaactacaaggaacccctagtgatggagttggccactccctctctgcgcgctcgctcgctcactgaggccgggcgaccaaaggtcgcccgacgcccgggctttgcccgggcggcctcagtgagcgagcgagcgcgcagccttaattaacctaattcactggccgtcgttttacaacgtcgtgactgggaaaaccctggcgttacccaacttaatcgccttgcagcacatccccctttcgccagctggcgtaatagcgaagaggcccgcaccgatcgcccttcccaacagttgcgcagcctgaatggcgaatgggacgcgccctgtagcggcgcattaagcgcggcgggtgtggtggttacgcgcagcgtgaccgctacacttgccagcgccctagcgcccgctcctttcgctttcttcccttcctttctcgccacgttcgccggctttccccgtcaagctctaaatcgggggctccctttagggttccgatttagtgctttacggcacctcgaccccaaaaaacttgattagggtgatggttcacgtagtgggccatcgccctgatagacggtttttcgccctttgacgttggagtccacgttctttaatagtggactcttgttccaaactggaacaacactcaaccctatctcggtctattcttttgatttataagggattttgccgatttcggcctattggttaaaaaatgagctgatttaacaaaaatttaacgcgaattttaacaaaatattaacgcttacaatttaggtggcacttttcggggaaatgtgcgcggaacccctatttgtttatttttctaaatacattcaaatatgtatccgctcatgagacaataaccctgataaatgcttcaataatattgaaaaaggaagagtatgagtattcaacatttccgtgtcgcccttattcccttttttgcggcattttgccttcctgtttttgctcacccagaaacgctggtgaaagtaaaagatgctgaagatcagttgggtgcacgagtgggttacatcgaactggatctcaacagcggtaagatccttgagagttttcgccccgaagaacgttttccaatgatgagcacttttaaagttctgctatgtggcgcggtattatcccgtattgacgccgggcaagagcaactcggtcgccgcatacactattctcagaatgacttggttgagtactcaccagtcacagaaaagcatcttacggatggcatgacagtaagagaattatgcagtgctgccataaccatgagtgataacactgcggccaacttacttctgacaacgatcggaggaccgaaggagctaaccgcttttttgcacaacatgggggatcatgtaactcgccttgatcgttgggaaccggagctgaatgaagccataccaaacgacgagcgtgacaccacgatgcctgtagcaatggcaacaacgttgcgcaaactattaactggcgaactacttactctagcttcccggcaacaattaatagactggatggaggcggataaagttgcaggaccacttctgcgctcggcccttccggctggctggtttattgctgataaatctggagccggtgagcgtgggtctcgcggtatcattgcagcactggggccagatggtaagccctcccgtatcgtagttatctacacgacggggagtcaggcaactatggatgaacgaaatagacagatcgctgagataggtgcctcactgattaagcattggtaactgtcagaccaagtttactcatatatactttagattgatttaaaacttcatttttaatttaaaaggatctaggtgaagatcctttttgataatctcatgaccaaaatcccttaacgtgagttttcgttccactgagcgtcagaccccgtagaaaagatcaaaggatcttcttgagatcctttttttctgcgcgtaatctgctgcttgcaaacaaaaaaaccaccgctaccagcggtggtttgtttgccggatcaagagctaccaactctttttccgaaggtaactggcttcagcagagcgcagataccaaatactgttcttctagtgtagccgtagttaggccaccacttcaagaactctgtagcaccgcctacatacctcgctctgctaatcctgttaccagtggctgctgccagtggcgataagtcgtgtcttaccgggttggactcaagacgatagttaccggataaggcgcagcggtcgggctgaacggggggttcgtgcacacagcccagcttggagcgaacgacctacaccgaactgagatacctacagcgtgagctatgagaaagcgccacgcttcccgaagggagaaaggcggacaggtatccggtaagcggcagggtcggaacaggagagcgcacgagggagcttccagggggaaacgcctggtatctttatagtcctgtcgggtttcgccacctctgacttgagcgtcgatttttgtgatgctcgtcaggggggcggagcctatggaaaaacgccagcaacgcggcctttttacggttcctggccttttgctggccttttgctcacatgttctttcctgcgttatcccctgattctgtggataaccgtattaccgcctttgagtgagctgataccgctcgccgcagccgaacgaccgagcgcagcgagtcagtgagcgaggaagcggaagagcgcccaatacgcaaaccgcctctccccgcgcgttggccgattcattaatgcagctggcacgacaggtttcccgactggaaagcgggcagtgagcgcaacgcaattaatgtgagttagctcactcattaggcaccccaggctttacactttatgcttccggctcgtatgttgtgtggaattgtgagcggataacaatttcacacaggaaacagctatgaccatgattacgccagatttaattaaggccttaattagg

SEQ ID NO: 67 - DNA, 4808 bp, Artificial Sequence
  Description of Artificial Sequence: Synthetic polynucleotide
ctgcgcgctcgctcgctcactgaggccgcccgggcaaagcccgggcgtcgggcgacctttggtcgcccggcctcagtgagcgagcgagcgcgcagagagggagtgtagccatgctctaggaagatcaattcaattcacgcgtcgacattgattattgactagttattaatagtaatcaattacggggtcattagttcatagcccatatatggagttccgcgttacataacttacggtaaatggcccgcctggctgaccgcccaacgacccccgcccattgacgtcaataatgacgtatgttcccatagtaacgccaatagggactttccattgacgtcaatgggtggagtatttacggtaaactgcccacttggcagtacatcaagtgtatcatatgccaagtacgccccctattgacgtcaatgacggtaaatggcccgcctggcattatgcccagtacatgaccttatgggactttcctacttggcagtacatctacgtattagtcatcgctattaccatgtcgaggccacgttctgcttcactctccccatctcccccccctccccacccccaattttgtatttatttattttttaattattttgtgcagcgatgggggcggggggggggggcgcgcgccaggcggggcggggcggggcgaggggcggggcggggcgaggcggagaggtgcggcggcagccaatcagagcggcgcgctccgaaagtttccttttatggcgaggcggcggcggcggcggccctataaaaagcgaagcgcgcggcgggcgggagcaagcttgaactgaaaaaccagaaagttaactggtaagtttagtctttttgtcttttatttcaggtcccggatccggtggtggtgcaaatcaaagaactgctcctcagtggatgttgcctttacttctaggcctgtacggaagtgttacttctgctctaaaagctgcggaattgtacccgcggccgatccaccggtatgtggactctcgggcgccgcgcagtagccggcctcctggcgtcacccagcccagcccaggcccagaccctcacccgggtcccgcggccggcagagttggccccactctgcggccgccgtggcctgcgcaccgacatcgatgcgacctgcacgccccgccgcgcaagttcgaaccaacgtggcctcaaccagatttggaatgtcaaaaagcagagtgtctatttgatgaatttgaggaaatctggaactttgggccacccaggctctctagatgagaccacctatgaaagactagcagaggaaacgctggactctttagcagagttttttgaagaccttgcagacaagccatacacgtttgaggactatgatgtctcctttgggagtggtgtcttaactgtcaaactgggtggagatctaggaacctatgtgatcaacaagcagacgccaaacaagcaaatctggctatcttctccatccagtggacctaagcgttatgactggactgggaaaaactgggtgtactcccacgacggcgtgtccctccatgagctgctggccgcagagctcactaaagccttaaaaaccaaactggacttgtcttccttggcctattccggaaaagatgctgaacaaaaactcatctcagaagaggatctgtagctcgaggacggggtgaactacgcctgaggatccgatctttttccctctgccaaaaattatggggacatcatgaagccccttgagcatctgacttctggctaataaaggaaatttattttcattgcaatagtgtgttggaattttttgtgtctctcactcggcctaggtagataagtagcatggcgggttaatcattaactacaaggaacccctagtgatggagttggccactccctctctgcgcgctcgctcgctcactgaggccgggcgaccaaaggtcgcccgacgcccgggctttgcccgggcggcctcagtgagcgagcgagcgcgcagccttaattaacctaattcactggccgtcgttttacaacgtcgtgactgggaaaaccctggcgttacccaacttaatcgccttgcagcacatccccctttcgccagctggcgtaatagcgaagaggcccgcaccgatcgcccttcccaacagttgcgcagcctgaatggcgaatgggacgcgccctgtagcggcgcattaagcgcggcgggtgtggtggttacgcgcagcgtgaccgctacacttgccagcgccctagcgcccgctcctttcgctttcttcccttcctttctcgccacgttcgccggctttccccgtcaagctctaaatcgggggctccctttagggttccgatttagtgctttacggcacctcgaccccaaaaaacttgattagggtgatggttcacgtagtgggccatcgccctgatagacggtttttcgccctttgacgttggagtccacgttctttaatagtggactcttgttccaaactggaacaacactcaaccctatctcggtctattcttttgatttataagggattttgccgatttcggcctattggttaaaaaatgagctgatttaacaaaaatttaacgcgaattttaacaaaatattaacgcttacaatttaggtggcacttttcggggaaatgtgcgcggaacccctatttgtttatttttctaaatacattcaaatatgtatccgctcatgagacaataaccctgataaatgcttcaataatattgaaaaaggaagagtatgagtattcaacatttccgtgtcgcccttattcccttttttgcggcattttgccttcctgtttttgctcacccagaaacgctggtgaaagtaaaagatgctgaagatcagttgggtgcacgagtgggttacatcgaactggatctcaacagcggtaagatccttgagagttttcgccccgaagaacgttttccaatgatgagcacttttaaagttctgctatgtggcgcggtattatcccgtattgacgccgggcaagagcaactcggtcgccgcatacactattctcagaatgacttggttgagtactcaccagtcacagaaaagcatcttacggatggcatgacagtaagagaattatgcagtgctgccataaccatgagtgataacactgcggccaacttacttctgacaacgatcggaggaccgaaggagctaaccgcttttttgcacaacatgggggatcatgtaactcgccttgatcgttgggaaccggagctgaatgaagccataccaaacgacgagcgtgacaccacgatgcctgtagcaatggcaacaacgttgcgcaaactattaactggcgaactacttactctagcttcccggcaacaattaatagactggatggaggcggataaagttgcaggaccacttctgcgctcggcccttccggctggctggtttattgctgataaatctggagccggtgagcgtgggtctcgcggtatcattgcagcactggggccagatggtaagccctcccgtatcgtagttatctacacgacggggagtcaggcaactatggatgaacgaaatagacagatcgctgagataggtgcctcactgattaagcattggtaactgtcagaccaagtttactcatatatactttagattgatttaaaacttcatttttaatttaaaaggatctaggtgaagatcctttttgataatctcatgaccaaaatcccttaacgtgagttttcgttccactgagcgtcagaccccgtagaaaagatcaaaggatcttcttgagatcctttttttctgcgcgtaatctgctgcttgcaaacaaaaaaaccaccgctaccagcggtggtttgtttgccggatcaagagctaccaactctttttccgaaggtaactggcttcagcagagcgcagataccaaatactgttcttctagtgtagccgtagttaggccaccacttcaagaactctgtagcaccgcctacatacctcgctctgctaatcctgttaccagtggctgctgccagtggcgataagtcgtgtcttaccgggttggactcaagacgatagttaccggataaggcgcagcggtcgggctgaacggggggttcgtgcacacagcccagcttggagcgaacgacctacaccgaactgagatacctacagcgtgagctatgagaaagcgccacgcttcccgaagggagaaaggcggacaggtatccggtaagcggcagggtcggaacaggagagcgcacgagggagcttccagggggaaacgcctggtatctttatagtcctgtcgggtttcgccacctctgacttgagcgtcgatttttgtgatgctcgtcaggggggcggagcctatggaaaaacgccagcaacgcggcctttttacggttcctggccttttgctggccttttgctcacatgttctttcctgcgttatcccctgattctgtggataaccgtattaccgcctttgagtgagctgataccgctcgccgcagccgaacgaccgagcgcagcgagtcagtgagcgaggaagcggaagagcgcccaatacgcaaaccgcctctccccgcgcgttggccgattcattaatgcagctggcacgacaggtttcccgactggaaagcgggcagtgagcgcaacgcaattaatgtgagttagctcactcattaggcaccccaggctttacactttatgcttccggctcgtatgttgtgtggaattgtgagcggataacaatttcacacaggaaacagctatgaccatgattacgccagatttaattaaggccttaattagg

SEQ ID NO: 68 - DNA, 4886 bp, Artificial Sequence
  Description of Artificial Sequence: Synthetic polynucleotide
ctgcgcgctcgctcgctcactgaggccgcccgggcaaagcccgggcgtcgggcgacctttggtcgcccggcctcagtgagcgagcgagcgcgcagagagggagtgtagccatgctctaggaagatcaattcaattcacgcgtcgacattgattattgactagttattaatagtaatcaattacggggtcattagttcatagcccatatatggagttccgcgttacataacttacggtaaatggcccgcctggctgaccgcccaacgacccccgcccattgacgtcaataatgacgtatgttcccatagtaacgccaatagggactttccattgacgtcaatgggtggagtatttacggtaaactgcccacttggcagtacatcaagtgtatcatatgccaagtacgccccctattgacgtcaatgacggtaaatggcccgcctggcattatgcccagtacatgaccttatgggactttcctacttggcagtacatctacgtattagtcatcgctattaccatgtcgaggccacgttctgcttcactctccccatctcccccccctccccacccccaattttgtatttatttattttttaattattttgtgcagcgatgggggcggggggggggggcgcgcgccaggcggggcggggcggggcgaggggcggggcggggcgaggcggagaggtgcggcggcagccaatcagagcggcgcgctccgaaagtttccttttatggcgaggcggcggcggcggcggccctataaaaagcgaagcgcgcggcgggcgggagcaagcttgaactgaaaaaccagaaagttaactggtaagtttagtctttttgtcttttatttcaggtcccggatccggtggtggtgcaaatcaaagaactgctcctcagtggatgttgcctttacttctaggcctgtacggaagtgttacttctgctctaaaagctgcggaattgtacccgcggccgatccaccggtatgtggactctcgggcgccgcgcagtagccggcctcctggcgtcacccagcccagcccaggcccagaccctcacccgggtcccgcggccggcagagttggccccactctgcggccgccgtggcctgcgcaccgacatcgatgcgacctgcacgccccgccgcgcaagttcgaaccaacgtggcctcaaccagatttggaatgtcaaaaagcagagtgtctatttgatgaatttgaggaaatctggaactttgggccacccaggctctctagatgagaccacctatgaaagactagcagaggaaacgctggactctttagcagagttttttgaagaccttgcagacaagccatacacgtttgaggactatgatgtctcctttgggagtggtgtcttaactgtcaaactgggtggagatctaggaacctatgtgatcaacaagcagacgccaaacaagcaaatctggctatcttctccatccagtggacctaagcgttatgactggactgggaaaaactgggtgtactcccacgacggcgtgtccctccatgagctgctggccgcagagctcactaaagccttaaaaaccaaactggacttgtcttccttggcctattccggaaaagatgctggatccgactacaaagaccatgacggtgattataaagatcatgacatcgactacaaggatgacgatgacaagggatccgaacaaaaactcatctcagaagaggatctgtagctcgaggacggggtgaactacgcctgaggatccgatctttttccctctgccaaaaattatggggacatcatgaagccccttgagcatctgacttctggctaataaaggaaatttattttcattgcaatagtgtgttggaattttttgtgtctctcactcggcctaggtagataagtagcatggcgggttaatcattaactacaaggaacccctagtgatggagttggccactccctctctgcgcgctcgctcgctcactgaggccgggcgaccaaaggtcgcccgacgcccgggctttgcccgggcggcctcagtgagcgagcgagcgcgcagccttaattaacctaattcactggccgtcgttttacaacgtcgtgactgggaaaaccctggcgttacccaacttaatcgccttgcagcacatccccctttcgccagctggcgtaatagcgaagaggcccgcaccgatcgcccttcccaacagttgcgcagcctgaatggcgaatgggacgcgccctgtagcggcgcattaagcgcggcgggtgtggtggttacgcgcagcgtgaccgctacacttgccagcgccctagcgcccgctcctttcgctttcttcccttcctttctcgccacgttcgccggctttccccgtcaagctctaaatcgggggctccctttagggttccgatttagtgctttacggcacctcgaccccaaaaaacttgattagggtgatggttcacgtagtgggccatcgccctgatagacggtttttcgccctttgacgttggagtccacgttctttaatagtggactcttgttccaaactggaacaacactcaaccctatctcggtctattcttttgatttataagggattttgccgatttcggcctattggttaaaaaatgagctgatttaacaaaaatttaacgcgaattttaacaaaatattaacgcttacaatttaggtggcacttttcggggaaatgtgcgcggaacccctatttgtttatttttctaaatacattcaaatatgtatccgctcatgagacaataaccctgataaatgcttcaataatattgaaaaaggaagagtatgagtattcaacatttccgtgtcgcccttattcccttttttgcggcattttgccttcctgtttttgctcacccagaaacgctggtgaaagtaaaagatgctgaagatcagttgggtgcacgagtgggttacatcgaactggatctcaacagcggtaagatccttgagagttttcgccccgaagaacgttttccaatgatgagcacttttaaagttctgctatgtggcgcggtattatcccgtattgacgccgggcaagagcaactcggtcgccgcatacactattctcagaatgacttggttgagtactcaccagtcacagaaaagcatcttacggatggcatgacagtaagagaattatgcagtgctgccataaccatgagtgataacactgcggccaacttacttctgacaacgatcggaggaccgaaggagctaaccgcttttttgcacaacatgggggatcatgtaactcgccttgatcgttgggaaccggagctgaatgaagccataccaaacgacgagcgtgacaccacgatgcctgtagcaatggcaacaacgttgcgcaaactattaactggcgaactacttactctagcttcccggcaacaattaatagactggatggaggcggataaagttgcaggaccacttctgcgctcggcccttccggctggctggtttattgctgataaatctggagccggtgagcgtgggtctcgcggtatcattgcagcactggggccagatggtaagccctcccgtatcgtagttatctacacgacggggagtcaggcaactatggatgaacgaaatagacagatcgctgagataggtgcctcactgattaagcattggtaactgtcagaccaagtttactcatatatactttagattgatttaaaacttcatttttaatttaaaaggatctaggtgaagatcctttttgataatctcatgaccaaaatcccttaacgtgagttttcgttccactgagcgtcagaccccgtagaaaagatcaaaggatcttcttgagatcctttttttctgcgcgtaatctgctgcttgcaaacaaaaaaaccaccgctaccagcggtggtttgtttgccggatcaagagctaccaactctttttccgaaggtaactggcttcagcagagcgcagataccaaatactgttcttctagtgtagccgtagttaggccaccacttcaagaactctgtagcaccgcctacatacctcgctctgctaatcctgttaccagtggctgctgccagtggcgataagtcgtgtcttaccgggttggactcaagacgatagttaccggataaggcgcagcggtcgggctgaacggggggttcgtgcacacagcccagcttggagcgaacgacctacaccgaactgagatacctacagcgtgagctatgagaaagcgccacgcttcccgaagggagaaaggcggacaggtatccggtaagcggcagggtcggaacaggagagcgcacgagggagcttccagggggaaacgcctggtatctttatagtcctgtcgggtttcgccacctctgacttgagcgtcgatttttgtgatgctcgtcaggggggcggagcctatggaaaaacgccagcaacgcggcctttttacggttcctggccttttgctggccttttgctcacatgttctttcctgcgttatcccctgattctgtggataaccgtattaccgcctttgagtgagctgataccgctcgccgcagccgaacgaccgagcgcagcgagtcagtgagcgaggaagcggaagagcgcccaatacgcaaaccgcctctccccgcgcgttggccgattcattaatgcagctggcacgacaggtttcccgactggaaagcgggcagtgagcgcaacgcaattaatgtgagttagctcactcattaggcaccccaggctttacactttatgcttccggctcgtatgttgtgtggaattgtgagcggataacaatttcacacaggaaacagctatgaccatgattacgccagatttaattaaggccttaattagg

SEQ ID NO: 69 - DNA, 4778 bp, Artificial Sequence
  Description of Artificial Sequence: Synthetic polynucleotide
ctgcgcgctcgctcgctcactgaggccgcccgggcaaagcccgggcgtcgggcgacctttggtcgcccggcctcagtgagcgagcgagcgcgcagagagggagtgtagccatgctctaggaagatcaattcaattcacgcgtcgacattgattattgactagttattaatagtaatcaattacggggtcattagttcatagcccatatatggagttccgcgttacataacttacggtaaatggcccgcctggctgaccgcccaacgacccccgcccattgacgtcaataatgacgtatgttcccatagtaacgccaatagggactttccattgacgtcaatgggtggagtatttacggtaaactgcccacttggcagtacatcaagtgtatcatatgccaagtacgccccctattgacgtcaatgacggtaaatggcccgcctggcattatgcccagtacatgaccttatgggactttcctacttggcagtacatctacgtattagtcatcgctattaccatgtcgaggccacgttctgcttcactctccccatctcccccccctccccacccccaattttgtatttatttattttttaattattttgtgcagcgatgggggcggggggggggggcgcgcgccaggcggggcggggcggggcgaggggcggggcggggcgaggcggagaggtgcggcggcagccaatcagagcggcgcgctccgaaagtttccttttatggcgaggcggcggcggcggcggccctataaaaagcgaagcgcgcggcgggcgggagcaagcttgaactgaaaaaccagaaagttaactggtaagtttagtctttttgtcttttatttcaggtcccggatccggtggtggtgcaaatcaaagaactgctcctcagtggatgttgcctttacttctaggcctgtacggaagtgttacttctgctctaaaagctgcggaattgtacccgcggccgatccaccggtatgtggacactcgggcgacgcgccgtggctgggctgcttgcttccccaagtcccgcacaggcgcaaaccctcacaagggtcccacggccagctgaattggccccgctgtgcggtcggaggggcctgcgaacagatatagacgcaacgtgcacccccagaagagcaagcagcaaccagagaggcctcaatcagatttggaacgtcaagaaacagagtgtctatctgatgaacctccgcaaatcagggacccttggtcatccgggatctcttgatgaaacgacctatgaacggctggctgaggagacgcttgactccctggcagagttcttcgaggatctggctgataagccatacacgttcgaggactatgatgtttcttttggttctggcgtcctgacggtgaaactcggaggggatctgggcacttacgttatcaacaaacagactcccaataaacagatttggttgtctagtcctagcagtggcccaaaacgctatgactggacgggcaagaactgggtgtactcccacgatggagttagcctgcacgaacttctggccgctgagcttactaaagcgctgaagactaagctggatctctccagcctcgcatacagcggcaaagacgcctagctcgaggacggggtgaactacgcctgaggatccgatctttttccctctgccaaaaattatggggacatcatgaagccccttgagcatctgacttctggctaataaaggaaatttattttcattgcaatagtgtgttggaattttttgtgtctctcactcggcctaggtagataagtagcatggcgggttaatcattaactacaaggaacccctagtgatggagttggccactccctctctgcgcgctcgctcgctcactgaggccgggcgaccaaaggtcgcccgacgcccgggctttgcccgggcggcctcagtgagcgagcgagcgcgcagccttaattaacctaattcactggccgtcgttttacaacgtcgtgactgggaaaaccctggcgttacccaacttaatcgccttgcagcacatccccctttcgccagctggcgtaatagcgaagaggcccgcaccgatcgcccttcccaacagttgcgcagcctgaatggcgaatgggacgcgccctgtagcggcgcattaagcgcggcgggtgtggtggttacgcgcagcgtgaccgctacacttgccagcgccctagcgcccgctcctttcgctttcttcccttcctttctcgccacgttcgccggctttccccgtcaagctctaaatcgggggctccctttagggttccgatttagtgctttacggcacctcgaccccaaaaaacttgattagggtgatggttcacgtagtgggccatcgccctgatagacggtttttcgccctttgacgttggagtccacgttctttaatagtggactcttgttccaaactggaacaacactcaaccctatctcggtctattcttttgatttataagggattttgccgatttcggcctattggttaaaaaatgagctgatttaacaaaaatttaacgcgaattttaacaaaatattaacgcttacaatttaggtggcacttttcggggaaatgtgcgcggaacccctatttgtttatttttctaaatacattcaaatatgtatccgctcatgagacaataaccctgataaatgcttcaataatattgaaaaaggaagagtatgagtattcaacatttccgtgtcgcccttattcccttttttgcggcattttgccttcctgtttttgctcacccagaaacgctggtgaaagtaaaagatgctgaagatcagttgggtgcacgagtgggttacatcgaactggatctcaacagcggtaagatccttgagagttttcgccccgaagaacgttttccaatgatgagcacttttaaagttctgctatgtggcgcggtattatcccgtattgacgccgggcaagagcaactcggtcgccgcatacactattctcagaatgacttggttgagtactcaccagtcacagaaaagcatcttacggatggcatgacagtaagagaattatgcagtgctgccataaccatgagtgataacactgcggccaacttacttctgacaacgatcggaggaccgaaggagctaaccgcttttttgcacaacatgggggatcatgtaactcgccttgatcgttgggaaccggagctgaatgaagccataccaaacgacgagcgtgacaccacgatgcctgtagcaatggcaacaacgttgcgcaaactattaactggcgaactacttactctagcttcccggcaacaattaatagactggatggaggcggataaagttgcaggaccacttctgcgctcggcccttccggctggctggtttattgctgataaatctggagccggtgagcgtgggtctcgcggtatcattgcagcactggggccagatggtaagccctcccgtatcgtagttatctacacgacggggagtcaggcaactatggatgaacgaaatagacagatcgctgagataggtgcctcactgattaagcattggtaactgtcagaccaagtttactcatatatactttagattgatttaaaacttcatttttaatttaaaaggatctaggtgaagatcctttttgataatctcatgaccaaaatcccttaacgtgagttttcgttccactgagcgtcagaccccgtagaaaagatcaaaggatcttcttgagatcctttttttctgcgcgtaatctgctgcttgcaaacaaaaaaaccaccgctaccagcggtggtttgtttgccggatcaagagctaccaactctttttccgaaggtaactggcttcagcagagcgcagataccaaatactgttcttctagtgtagccgtagttaggccaccacttcaagaactctgtagcaccgcctacatacctcgctctgctaatcctgttaccagtggctgctgccagtggcgataagtcgtgtcttaccgggttggactcaagacgatagttaccggataaggcgcagcggtcgggctgaacggggggttcgtgcacacagcccagcttggagcgaacgacctacaccgaactgagatacctacagcgtgagctatgagaaagcgccacgcttcccgaagggagaaaggcggacaggtatccggtaagcggcagggtcggaacaggagagcgcacgagggagcttccagggggaaacgcctggtatctttatagtcctgtcgggtttcgccacctctgacttgagcgtcgatttttgtgatgctcgtcaggggggcggagcctatggaaaaacgccagcaacgcggcctttttacggttcctggccttttgctggccttttgctcacatgttctttcctgcgttatcccctgattctgtggataaccgtattaccgcctttgagtgagctgataccgctcgccgcagccgaacgaccgagcgcagcgagtcagtgagcgaggaagcggaagagcgcccaatacgcaaaccgcctctccccgcgcgttggccgattcattaatgcagctggcacgacaggtttcccgactggaaagcgggcagtgagcgcaacgcaattaatgtgagttagctcactcattaggcaccccaggctttacactttatgcttccggctcgtatgttgtgtggaattgtgagcggataacaatttcacacaggaaacagctatgaccatgattacgccagatttaattaaggccttaattagg

SEQ ID NO: 70 - DNA, 4778 bp, Artificial Sequence
  Description of Artificial Sequence: Synthetic polynucleotide
ctgcgcgctcgctcgctcactgaggccgcccgggcaaagcccgggcgtcgggcgacctttggtcgcccggcctcagtgagcgagcgagcgcgcagagagggagtgtagccatgctctaggaagatcaattcaattcacgcgtcgacattgattattgactagttattaatagtaatcaattacggggtcattagttcatagcccatatatggagttccgcgttacataacttacggtaaatggcccgcctggctgaccgcccaacgacccccgcccattgacgtcaataatgacgtatgttcccatagtaacgccaatagggactttccattgacgtcaatgggtggagtatttacggtaaactgcccacttggcagtacatcaagtgtatcatatgccaagtacgccccctattgacgtcaatgacggtaaatggcccgcctggcattatgcccagtacatgaccttatgggactttcctacttggcagtacatctacgtattagtcatcgctattaccatgtcgaggccacgttctgcttcactctccccatctcccccccctccccacccccaattttgtatttatttattttttaattattttgtgcagcgatgggggcggggggggggggcgcgcgccaggcggggcggggcggggcgaggggcggggcggggcgaggcggagaggtgcggcggcagccaatcagagcggcgcgctccgaaagtttccttttatggcgaggcggcggcggcggcggccctataaaaagcgaagcgcgcggcgggcgggagcaagcttgaactgaaaaaccagaaagttaactggtaagtttagtctttttgtcttttatttcaggtcccggatccggtggtggtgcaaatcaaagaactgctcctcagtggatgttgcctttacttctaggcctgtacggaagtgttacttctgctctaaaagctgcggaattgtacccgcggccgatccaccggtatgtggactctgggtcgacgcgccgtagccggtctcttggcctccccatcccctgcgcaggcacagacccttacacgagttccacggcccgctgaactggcaccactctgcggacgccggggcctgagaaccgatattgacgctacgtgcactccccgacgagcctcttctaatcagagggggctcaaccagatctggaacgtgaagaagcagtcagtctacttgatgaatctgagaaagagcgggacccttgggcaccccgggtctctcgacgagactacatacgagaggctggccgaggagactttggactctctcgccgaattcttcgaggatttggcagacaagccgtacacctttgaagactacgatgtctcattcggatcaggggtgctgacggttaaactggggggcgatctcggaacctacgtcataaacaaacagacacccaataagcagatctggttgtctagcccatcatccggtcctaaacggtacgactggaccggcaagaactgggtctactcccatgacggagtcagtcttcatgaactgcttgccgcagagctgaccaaggctcttaagacgaaactggatctctctagcctggcctactccgggaaggatgcatagctcgaggacggggtgaactacgcctgaggatccgatctttttccctctgccaaaaattatggggacatcatgaagccccttgagcatctgacttctggctaataaaggaaatttattttcattgcaatagtgtgttggaattttttgtgtctctcactcggcctaggtagataagtagcatggcgggttaatcattaactacaaggaacccctagtgatggagttggccactccctctctgcgcgctcgctcgctcactgaggccgggcgaccaaaggtcgcccgacgcccgggctttgcccgggcggcctcagtgagcgagcgagcgcgcagccttaattaacctaattcactggccgtcgttttacaacgtcgtgactgggaaaaccctggcgttacccaacttaatcgccttgcagcacatccccctttcgccagctggcgtaatagcgaagaggcccgcaccgatcgcccttcccaacagttgcgcagcctgaatggcgaatgggacgcgccctgtagcggcgcattaagcgcggcgggtgtggtggttacgcgcagcgtgaccgctacacttgccagcgccctagcgcccgctcctttcgctttcttcccttcctttctcgccacgttcgccggctttccccgtcaagctctaaatcgggggctccctttagggttccgatttagtgctttacggcacctcgaccccaaaaaacttgattagggtgatggttcacgtagtgggccatcgccctgatagacggtttttcgccctttgacgttggagtccacgttctttaatagtggactcttgttccaaactggaacaacactcaaccctatctcggtctattcttttgatttataagggattttgccgatttcggcctattggttaaaaaatgagctgatttaacaaaaatttaacgcgaattttaacaaaatattaacgcttacaatttaggtggcacttttcggggaaatgtgcgcggaacccctatttgtttatttttctaaatacattcaaatatgtatccgctcatgagacaataaccctgataaatgcttcaataatattgaaaaaggaagagtatgagtattcaacatttccgtgtcgcccttattcccttttttgcggcattttgccttcctgtttttgctcacccagaaacgctggtgaaagtaaaagatgctgaagatcagttgggtgcacgagtgggttacatcgaactggatctcaacagcggtaagatccttgagagttttcgccccgaagaacgttttccaatgatgagcacttttaaagttctgctatgtggcgcggtattatcccgtattgacgccgggcaagagcaactcggtcgccgcatacactattctcagaatgacttggttgagtactcaccagtcacagaaaagcatcttacggatggcatgacagtaagagaattatgcagtgctgccataaccatgagtgataacactgcggccaacttacttctgacaacgatcggaggaccgaaggagctaaccgcttttttgcacaacatgggggatcatgtaactcgccttgatcgttgggaaccggagctgaatgaagccataccaaacgacgagcgtgacaccacgatgcctgtagcaatggcaacaacgttgcgcaaactattaactggcgaactacttactctagcttcccggcaacaattaatagactggatggaggcggataaagttgcaggaccacttctgcgctcggcccttccggctggctggtttattgctgataaatctggagccggtgagcgtgggtctcgcggtatcattgcagcactggggccagatggtaagccctcccgtatcgtagttatctacacgacggggagtcaggcaactatggatgaacgaaatagacagatcgctgagataggtgcctcactgattaagcattggtaactgtcagaccaagtttactcatatatactttagattgatttaaaacttcatttttaatttaaaaggatctaggtgaagatcctttttgataatctcatgaccaaaatcccttaacgtgagttttcgttccactgagcgtcagaccccgtagaaaagatcaaaggatcttcttgagatcctttttttctgcgcgtaatctgctgcttgcaaacaaaaaaaccaccgctaccagcggtggtttgtttgccggatcaagagctaccaactctttttccgaaggtaactggcttcagcagagcgcagataccaaatactgttcttctagtgtagccgtagttaggccaccacttcaagaactctgtagcaccgcctacatacctcgctctgctaatcctgttaccagtggctgctgccagtggcgataagtcgtgtcttaccgggttggactcaagacgatagttaccggataaggcgcagcggtcgggctgaacggggggttcgtgcacacagcccagcttggagcgaacgacctacaccgaactgagatacctacagcgtgagctatgagaaagcgccacgcttcccgaagggagaaaggcggacaggtatccggtaagcggcagggtcggaacaggagagcgcacgagggagcttccagggggaaacgcctggtatctttatagtcctgtcgggtttcgccacctctgacttgagcgtcgatttttgtgatgctcgtcaggggggcggagcctatggaaaaacgccagcaacgcggcctttttacggttcctggccttttgctggccttttgctcacatgttctttcctgcgttatcccctgattctgtggataaccgtattaccgcctttgagtgagctgataccgctcgccgcagccgaacgaccgagcgcagcgagtcagtgagcgaggaagcggaagagcgcccaatacgcaaaccgcctctccccgcgcgttggccgattcattaatgcagctggcacgacaggtttcccgactggaaagcgggcagtgagcgcaacgcaattaatgtgagttagctcactcattaggcaccccaggctttacactttatgcttccggctcgtatgttgtgtggaattgtgagcggataacaatttcacacaggaaacagctatgaccatgattacgccagatttaattaaggccttaattagg

SEQ ID NO: 71 - DNA, 4778 bp, Artificial Sequence
  Description of Artificial Sequence: Synthetic polynucleotide
ctgcgcgctcgctcgctcactgaggccgcccgggcaaagcccgggcgtcgggcgacctttggtcgcccggcctcagtgagcgagcgagcgcgcagagagggagtgtagccatgctctaggaagatcaattcaattcacgcgtcgacattgattattgactagttattaatagtaatcaattacggggtcattagttcatagcccatatatggagttccgcgttacataacttacggtaaatggcccgcctggctgaccgcccaacgacccccgcccattgacgtcaataatgacgtatgttcccatagtaacgccaatagggactttccattgacgtcaatgggtggagtatttacggtaaactgcccacttggcagtacatcaagtgtatcatatgccaagtacgccccctattgacgtcaatgacggtaaatggcccgcctggcattatgcccagtacatgaccttatgggactttcctacttggcagtacatctacgtattagtcatcgctattaccatgtcgaggccacgttctgcttcactctccccatctcccccccctccccacccccaattttgtatttatttattttttaattattttgtgcagcgatgggggcggggggggggggcgcgcgccaggcggggcggggcggggcgaggggcggggcggggcgaggcggagaggtgcggcggcagccaatcagagcggcgcgctccgaaagtttccttttatggcgaggcggcggcggcggcggccctataaaaagcgaagcgcgcggcgggcgggagcaagcttgaactgaaaaaccagaaagttaactggtaagtttagtctttttgtcttttatttcaggtcccggatccggtggtggtgcaaatcaaagaactgctcctcagtggatgttgcctttacttctaggcctgtacggaagtgttacttctgctctaaaagctgcggaattgtacccgcggccgatccaccggtatgtggactctcgggcgacgcgccgtagccggtctcctggcttccccaagccctgcacaggcacagaccctcacacgggtcccacggccagctgaattggccccactctgcggtcgccggggcctgcgaaccgatatagacgcaacgtgcactccccgacgagcaagttccaaccagagagggctcaaccagatttggaacgtcaagaagcagagtgtctatttgatgaatctgagaaaatccgggacccttgggcaccccggatctcttgatgaaactacctatgaaaggctggccgaggagacgctggactctctggcagagttcttcgaggatctggcagacaagccatacacgtttgaggactatgatgtctcttttggatctggcgtcctgacggttaaactgggaggggatctcggaacctacgttatcaacaaacagactcccaataagcagatctggttgtctagtccatccagtggtcctaaacgctatgactggacgggcaagaactgggtgtactcccacgacggagttagccttcatgaactgctggccgcagagctgactaaagctcttaagactaaactggatctctctagcctggcctactccgggaaagatgcctagctcgaggacggggtgaactacgcctgaggatccgatctttttccctctgccaaaaattatggggacatcatgaagccccttgagcatctgacttctggctaataaaggaaatttattttcattgcaatagtgtgttggaattttttgtgtctctcactcggcctaggtagataagtagcatggcgggttaatcattaactacaaggaacccctagtgatggagttggccactccctctctgcgcgctcgctcgctcactgaggccgggcgaccaaaggtcgcccgacgcccgggctttgcccgggcggcctcagtgagcgagcgagcgcgcagccttaattaacctaattcactggccgtcgttttacaacgtcgtgactgggaaaaccctggcgttacccaacttaatcgccttgcagcacatccccctttcgccagctggcgtaatagcgaagaggcccgcaccgatcgcccttcccaacagttgcgcagcctgaatggcgaatgggacgcgccctgtagcggcgcattaagcgcggcgggtgtggtggttacgcgcagcgtgaccgctacacttgccagcgccctagcgcccgctcctttcgctttcttcccttcctttctcgccacgttcgccggctttccccgtcaagctctaaatcgggggctccctttagggttccgatttagtgctttacggcacctcgaccccaaaaaacttgattagggtgatggttcacgtagtgggccatcgccctgatagacggtttttcgccctttgacgttggagtccacgttctttaatagtggactcttgttccaaactggaacaacactcaaccctatctcggtctattcttttgatttataagggattttgccgatttcggcctattggttaaaaaatgagctgatttaacaaaaatttaacgcgaattttaacaaaatattaacgcttacaatttaggtggcacttttcggggaaatgtgcgcggaacccctatttgtttatttttctaaatacattcaaatatgtatccgctcatgagacaataaccctgataaatgcttcaataatattgaaaaaggaagagtatgagtattcaacatttccgtgtcgcccttattcccttttttgcggcattttgccttcctgtttttgctcacccagaaacgctggtgaaagtaaaagatgctgaagatcagttgggtgcacgagtgggttacatcgaactggatctcaacagcggtaagatccttgagagttttcgccccgaagaacgttttccaatgatgagcacttttaaagttctgctatgtggcgcggtattatcccgtattgacgccgggcaagagcaactcggtcgccgcatacactattctcagaatgacttggttgagtactcaccagtcacagaaaagcatcttacggatggcatgacagtaagagaattatgcagtgctgccataaccatgagtgataacactgcggccaacttacttctgacaacgatcggaggaccgaaggagctaaccgcttttttgcacaacatgggggatcatgtaactcgccttgatcgttgggaaccggagctgaatgaagccataccaaacgacgagcgtgacaccacgatgcctgtagcaatggcaacaacgttgcgcaaactattaactggcgaactacttactctagcttcccggcaacaattaatagactggatggaggcggataaagttgcaggaccacttctgcgctcggcccttccggctggctggtttattgctgataaatctggagccggtgagcgtgggtctcgcggtatcattgcagcactggggccagatggtaagccctcccgtatcgtagttatctacacgacggggagtcaggcaactatggatgaacgaaatagacagatcgctgagataggtgcctcactgattaagcattggtaactgtcagaccaagtttactcatatatactttagattgatttaaaacttcatttttaatttaaaaggatctaggtgaagatcctttttgataatctcatgaccaaaatcccttaacgtgagttttcgttccactgagcgtcagaccccgtagaaaagatcaaaggatcttcttgagatcctttttttctgcgcgtaatctgctgcttgcaaacaaaaaaaccaccgctaccagcggtggtttgtttgccggatcaagagctaccaactctttttccgaaggtaactggcttcagcagagcgcagataccaaatactgttcttctagtgtagccgtagttaggccaccacttcaagaactctgtagcaccgcctacatacctcgctctgctaatcctgttaccagtggctgctgccagtggcgataagtcgtgtcttaccgggttggactcaagacgatagttaccggataaggcgcagcggtcgggctgaacggggggttcgtgcacacagcccagcttggagcgaacgacctacaccgaactgagatacctacagcgtgagctatgagaaagcgccacgcttcccgaagggagaaaggcggacaggtatccggtaagcggcagggtcggaacaggagagcgcacgagggagcttccagggggaaacgcctggtatctttatagtcctgtcgggtttcgccacctctgacttgagcgtcgatttttgtgatgctcgtcaggggggcggagcctatggaaaaacgccagcaacgcggcctttttacggttcctggccttttgctggccttttgctcacatgttctttcctgcgttatcccctgattctgtggataaccgtattaccgcctttgagtgagctgataccgctcgccgcagccgaacgaccgagcgcagcgagtcagtgagcgaggaagcggaagagcgcccaatacgcaaaccgcctctccccgcgcgttggccgattcattaatgcagctggcacgacaggtttcccgactggaaagcgggcagtgagcgcaacgcaattaatgtgagttagctcactcattaggcaccccaggctttacactttatgcttccggctcgtatgttgtgtggaattgtgagcggataacaatttcacacaggaaacagctatgaccatgattacgccagatttaattaaggccttaattagg

SEQ ID NO: 72 - DNA, 4778 bp, Artificial Sequence
  Description of Artificial Sequence: Synthetic polynucleotide
ctgcgcgctcgctcgctcactgaggccgcccgggcaaagcccgggcgtcgggcgacctttggtcgcccggcctcagtgagcgagcgagcgcgcagagagggagtgtagccatgctctaggaagatcaattcaattcacgcgtcgacattgattattgactagttattaatagtaatcaattacggggtcattagttcatagcccatatatggagttccgcgttacataacttacggtaaatggcccgcctggctgaccgcccaacgacccccgcccattgacgtcaataatgacgtatgttcccatagtaacgccaatagggactttccattgacgtcaatgggtggagtatttacggtaaactgcccacttggcagtacatcaagtgtatcatatgccaagtacgccccctattgacgtcaatgacggtaaatggcccgcctggcattatgcccagtacatgaccttatgggactttcctacttggcagtacatctacgtattagtcatcgctattaccatgtcgaggccacgttctgcttcactctccccatctcccccccctccccacccccaattttgtatttatttattttttaattattttgtgcagcgatgggggcggggggggggggcgcgcgccaggcggggcggggcggggcgaggggcggggcggggcgaggcggagaggtgcggcggcagccaatcagagcggcgcgctccgaaagtttccttttatggcgaggcggcggcggcggcggccctataaaaagcgaagcgcgcggcgggcgggagcaagcttgaactgaaaaaccagaaagttaactggtaagtttagtctttttgtcttttatttcaggtcccggatccggtggtggtgcaaatcaaagaactgctcctcagtggatgttgcctttacttctaggcctgtacggaagtgttacttctgctctaaaagctgcggaattgtacccgcggccgatccaccggtatgtggactctggggcgacgcgccgtggccgggctcctggcatccccatcccctgcgcaggcgcaaaccctcacacgggttccacggccagctgaactggccccactgtgcggccggcggggcctgagaacagatattgacgcaacgtgcactcccagaagagccagcagcaaccagagggggttgaatcagatctggaacgtcaagaagcagtcagtgtacctgatgaatctccgaaaaagcgggacccttggtcaccccggatctctcgatgaaaccacatatgaacggctggccgaggaaacgctggactccctggccgagttcttcgaggacctggcagacaagccgtacaccttcgaagactatgatgtttcattcggaagtggcgtgctgacggtcaaactgggaggcgatctgggaacctacgttataaacaaacagactcccaataaacagatctggttgtctagtccatccagcggtcctaaacgctatgactggacgggcaagaactgggtctactcccacgacggagttagccttcacgaactgttggccgcagagctgacaaaggcgcttaagacgaaactggatctctctagcctggcctactccggcaaagatgcctagctcgaggacggggtgaactacgcctgaggatccgatctttttccctctgccaaaaattatggggacatcatgaagccccttgagcatctgacttctggctaataaaggaaatttattttcattgcaatagtgtgttggaattttttgtgtctctcactcggcctaggtagataagtagcatggcgggttaatcattaactacaaggaacccctagtgatggagttggccactccctctctgcgcgctcgctcgctcactgaggccgggcgaccaaaggtcgcccgacgcccgggctttgcccgggcggcctcagtgagcgagcgagcgcgcagccttaattaacctaattcactggccgtcgttttacaacgtcgtgactgggaaaaccctggcgttacccaacttaatcgccttgcagcacatccccctttcgccagctggcgtaatagcgaagaggcccgcaccgatcgcccttcccaacagttgcgcagcctgaatggcgaatgggacgcgccctgtagcggcgcattaagcgcggcgggtgtggtggttacgcgcagcgtgaccgctacacttgccagcgccctagcgcccgctcctttcgctttcttcccttcctttctcgccacgttcgccggctttccccgtcaagctctaaatcgggggctccctttagggttccgatttagtgctttacggcacctcgaccccaaaaaacttgattagggtgatggttcacgtagtgggccatcgccctgatagacggtttttcgccctttgacgttggagtccacgttctttaatagtggactcttgttccaaactggaacaacactcaaccctatctcggtctattcttttgatttataagggattttgccgatttcggcctattggttaaaaaatgagctgatttaacaaaaatttaacgcgaattttaacaaaatattaacgcttacaatttaggtggcacttttcggggaaatgtgcgcggaacccctatttgtttatttttctaaatacattcaaatatgtatccgctcatgagacaataaccctgataaatgcttcaataatattgaaaaaggaagagtatgagtattcaacatttccgtgtcgcccttattcccttttttgcggcattttgccttcctgtttttgctcacccagaaacgctggtgaaagtaaaagatgctgaagatcagttgggtgcacgagtgggttacatcgaactggatctcaacagcggtaagatccttgagagttttcgccccgaagaacgttttccaatgatgagcacttttaaagttctgctatgtggcgcggtattatcccgtattgacgccgggcaagagcaactcggtcgccgcatacactattctcagaatgacttggttgagtactcaccagtcacagaaaagcatcttacggatggcatgacagtaagagaattatgcagtgctgccataaccatgagtgataacactgcggccaacttacttctgacaacgatcggaggaccgaaggagctaaccgcttttttgcacaacatgggggatcatgtaactcgccttgatcgttgggaaccggagctgaatgaagccataccaaacgacgagcgtgacaccacgatgcctgtagcaatggcaacaacgttgcgcaaactattaactggcgaactacttactctagcttcccggcaacaattaatagactggatggaggcggataaagttgcaggaccacttctgcgctcggcccttccggctggctggtttattgctgataaatctggagccggtgagcgtgggtctcgcggtatcattgcagcactggggccagatggtaagccctcccgtatcgtagttatctacacgacggggagtcaggcaactatggatgaacgaaatagacagatcgctgagataggtgcctcactgattaagcattggtaactgtcagaccaagtttactcatatatactttagattgatttaaaacttcatttttaatttaaaaggatctaggtgaagatcctttttgataatctcatgaccaaaatcccttaacgtgagttttcgttccactgagcgtcagaccccgtagaaaagatcaaaggatcttcttgagatcctttttttctgcgcgtaatctgctgcttgcaaacaaaaaaaccaccgctaccagcggtggtttgtttgccggatcaagagctaccaactctttttccgaaggtaactggcttcagcagagcgcagataccaaatactgttcttctagtgtagccgtagttaggccaccacttcaagaactctgtagcaccgcctacatacctcgctctgctaatcctgttaccagtggctgctgccagtggcgataagtcgtgtcttaccgggttggactcaagacgatagttaccggataaggcgcagcggtcgggctgaacggggggttcgtgcacacagcccagcttggagcgaacgacctacaccgaactgagatacctacagcgtgagctatgagaaagcgccacgcttcccgaagggagaaaggcggacaggtatccggtaagcggcagggtcggaacaggagagcgcacgagggagcttccagggggaaacgcctggtatctttatagtcctgtcgggtttcgccacctctgacttgagcgtcgatttttgtgatgctcgtcaggggggcggagcctatggaaaaacgccagcaacgcggcctttttacggttcctggccttttgctggccttttgctcacatgttctttcctgcgttatcccctgattctgtggataaccgtattaccgcctttgagtgagctgataccgctcgccgcagccgaacgaccgagcgcagcgagtcagtgagcgaggaagcggaagagcgcccaatacgcaaaccgcctctccccgcgcgttggccgattcattaatgcagctggcacgacaggtttcccgactggaaagcgggcagtgagcgcaacgcaattaatgtgagttagctcactcattaggcaccccaggctttacactttatgcttccggctcgtatgttgtgtggaattgtgagcggataacaatttcacacaggaaacagctatgaccatgattacgccagatttaattaaggccttaattagg

SEQ ID NO: 73 - DNA, 4854 bp, Artificial Sequence
  Description of Artificial Sequence: Synthetic polynucleotide
caatttcacacaggaaacagctatgaccatgattacgccagatttaattaaggccttaattaggctgcgcgctcgctcgctcactgaggccgcccgggcaaagcccgggcgtcgggcgacctttggtcgcccggcctcagtgagcgagcgagcgcgcagagagggagtgtagccatgctctaggaagatcaattcaattcacgcgtcgacattgattattgactagttattaatagtaatcaattacggggtcattagttcatagcccatatatggagttccgcgttacataacttacggtaaatggcccgcctggctgaccgcccaacgacccccgcccattgacgtcaataatgacgtatgttcccatagtaacgccaatagggactttccattgacgtcaatgggtggagtatttacggtaaactgcccacttggcagtacatcaagtgtatcatatgccaagtacgccccctattgacgtcaatgacggtaaatggcccgcctggcattatgcccagtacatgaccttatgggactttcctacttggcagtacatctacgtattagtcatcgctattaccatggtgatgcggttttggcagtacatcaatgggcgtggatagcggtttgactcacggggatttccaagtctccaccccattgacgtcaatgggagtttgttttggcaccaaaatcaacgggactttccaaaatgtcgtaacaactccgccccattgacgcaaatgggcggtaggcgtgtacggtgggaggtctatataagcagagctctctggctaactagagaacccactgcttactggcttatcgaaattaatacgactcactatagggagacccaagctggctagcgtttaaacttcgggagcaagcttgaactgaaaaaccagaaagttaactggtaagtttagtctttttgtcttttatttcaggtcccggatccggtggtggtgcaaatcaaagaactgctcctcagtggatgttgcctttacttctaggcctgtacggaagtgttacttctgctctaaaagctgcggaattgtacccgcggccgatccaccggtatgtggactctcgggcgccgcgcagtagccggcctcctggcgtcacccagcccagcccaggcccagaccctcacccgggtcccgcggccggcagagttggccccactctgcggccgccgtggcctgcgcaccgacatcgatgcgacctgcacgccccgccgcgcaagttcgaaccaacgtggcctcaaccagatttggaatgtcaaaaagcagagtgtctatttgatgaatttgaggaaatctggaactttgggccacccaggctctctagatgagaccacctatgaaagactagcagaggaaacgctggactctttagcagagttttttgaagaccttgcagacaagccatacacgtttgaggactatgatgtctcctttgggagtggtgtcttaactgtcaaactgggtggagatctaggaacctatgtgatcaacaagcagacgccaaacaagcaaatctggctatcttctccatccagtggacctaagcgttatgactggactgggaaaaactgggtgtactcccacgacggcgtgtccctccatgagctgctggccgcagagctcactaaagccttaaaaaccaaactggacttgtcttccttggcctattccggaaaagatgcttgagcggccctagcgtttaaacgggccctctagagtcgacccgggcggcctcgaggacggggtgaactacgcctgaggatccgatctttttccctctgccaaaaattatggggacatcatgaagccccttgagcatctgacttctggctaataaaggaaatttattttcattgcaatagtgtgttggaattttttgtgtctctcactcggcctaggtagataagtagcatggcgggttaatcattaactacaaggaacccctagtgatggagttggccactccctctctgcgcgctcgctcgctcactgaggccgggcgaccaaaggtcgcccgacgcccgggctttgcccgggcggcctcagtgagcgagcgagcgcgcagccttaattaacctaattcactggccgtcgttttacaacgtcgtgactgggaaaaccctggcgttacccaacttaatcgccttgcagcacatccccctttcgccagctggcgtaatagcgaagaggcccgcaccgatcgcccttcccaacagttgcgcagcctgaatggcgaatgggacgcgccctgtagcggcgcattaagcgcggcgggtgtggtggttacgcgcagcgtgaccgctacacttgccagcgccctagcgcccgctcctttcgctttcttcccttcctttctcgccacgttcgccggctttccccgtcaagctctaaatcgggggctccctttagggttccgatttagtgctttacggcacctcgaccccaaaaaacttgattagggtgatggttcacgtagtgggccatcgccctgatagacggtttttcgccctttgacgttggagtccacgttctttaatagtggactcttgttccaaactggaacaacactcaaccctatctcggtctattcttttgatttataagggattttgccgatttcggcctattggttaaaaaatgagctgatttaacaaaaatttaacgcgaattttaacaaaatattaacgcttacaatttaggtggcacttttcggggaaatgtgcgcggaacccctatttgtttatttttctaaatacattcaaatatgtatccgctcatgagacaataaccctgataaatgcttcaataatattgaaaaaggaagagtatgagtattcaacatttccgtgtcgcccttattcccttttttgcggcattttgccttcctgtttttgctcacccagaaacgctggtgaaagtaaaagatgctgaagatcagttgggtgcacgagtgggttacatcgaactggatctcaacagcggtaagatccttgagagttttcgccccgaagaacgttttccaatgatgagcacttttaaagttctgctatgtggcgcggtattatcccgtattgacgccgggcaagagcaactcggtcgccgcatacactattctcagaatgacttggttgagtactcaccagtcacagaaaagcatcttacggatggcatgacagtaagagaattatgcagtgctgccataaccatgagtgataacactgcggccaacttacttctgacaacgatcggaggaccgaaggagctaaccgcttttttgcacaacatgggggatcatgtaactcgccttgatcgttgggaaccggagctgaatgaagccataccaaacgacgagcgtgacaccacgatgcctgtagcaatggcaacaacgttgcgcaaactattaactggcgaactacttactctagcttcccggcaacaattaatagactggatggaggcggataaagttgcaggaccacttctgcgctcggcccttccggctggctggtttattgctgataaatctggagccggtgagcgtgggtctcgcggtatcattgcagcactggggccagatggtaagccctcccgtatcgtagttatctacacgacggggagtcaggcaactatggatgaacgaaatagacagatcgctgagataggtgcctcactgattaagcattggtaactgtcagaccaagtttactcatatatactttagattgatttaaaacttcatttttaatttaaaaggatctaggtgaagatcctttttgataatctcatgaccaaaatcccttaacgtgagttttcgttccactgagcgtcagaccccgtagaaaagatcaaaggatcttcttgagatcctttttttctgcgcgtaatctgctgcttgcaaacaaaaaaaccaccgctaccagcggtggtttgtttgccggatcaagagctaccaactctttttccgaaggtaactggcttcagcagagcgcagataccaaatactgttcttctagtgtagccgtagttaggccaccacttcaagaactctgtagcaccgcctacatacctcgctctgctaatcctgttaccagtggctgctgccagtggcgataagtcgtgtcttaccgggttggactcaagacgatagttaccggataaggcgcagcggtcgggctgaacggggggttcgtgcacacagcccagcttggagcgaacgacctacaccgaactgagatacctacagcgtgagctatgagaaagcgccacgcttcccgaagggagaaaggcggacaggtatccggtaagcggcagggtcggaacaggagagcgcacgagggagcttccagggggaaacgcctggtatctttatagtcctgtcgggtttcgccacctctgacttgagcgtcgatttttgtgatgctcgtcaggggggcggagcctatggaaaaacgccagcaacgcggcctttttacggttcctggccttttgctggccttttgctcacatgttctttcctgcgttatcccctgattctgtggataaccgtattaccgcctttgagtgagctgataccgctcgccgcagccgaacgaccgagcgcagcgagtcagtgagcgaggaagcggaagagcgcccaatacgcaaaccgcctctccccgcgcgttggccgattcattaatgcagctggcacgacaggtttcccgactggaaagcgggcagtgagcgcaacgcaattaatgtgagttagctcactcattaggcaccccaggctttacactttatgcttccggctcgtatgttgtgtggaattgtgagcggataa

SEQ ID NO: 74 - DNA, 4808 bp, Artificial Sequence
  Description of Artificial Sequence: Synthetic polynucleotide
caatttcacacaggaaacagctatgaccatgattacgccagatttaattaaggccttaattaggctgcgcgctcgctcgctcactgaggccgcccgggcaaagcccgggcgtcgggcgacctttggtcgcccggcctcagtgagcgagcgagcgcgcagagagggagtgtagccatgctctaggaagatcaattcaattcacgcgtcgacattgattattgactagttattaatagtaatcaattacggggtcattagttcatagcccatatatggagttccgcgttacataacttacggtaaatggcccgcctggctgaccgcccaacgacccccgcccattgacgtcaataatgacgtatgttcccatagtaacgccaatagggactttccattgacgtcaatgggtggagtatttacggtaaactgcccacttggcagtacatcaagtgtatcatatgccaagtacgccccctattgacgtcaatgacggtaaatggcccgcctggcattatgcccagtacatgaccttatgggactttcctacttggcagtacatctacgtattagtcatcgctattaccatggtgatgcggttttggcagtacatcaatgggcgtggatagcggtttgactcacggggatttccaagtctccaccccattgacgtcaatgggagtttgttttggcaccaaaatcaacgggactttccaaaatgtcgtaacaactccgccccattgacgcaaatgggcggtaggcgtgtacggtgggaggtctatataagcagagctctctggctaactagagaacccactgcttactggcttatcgaaattaatacgactcactatagggagacccaagctggctagcgtttaaacttcgggagcaagcttgaactgaaaaaccagaaagttaactggtaagtttagtctttttgtcttttatttcaggtcccggatccggtggtggtgcaaatcaaagaactgctcctcagtggatgttgcctttacttctaggcctgtacggaagtgttacttctgctctaaaagctgcggaattgtacccgcggccgatccaccggtatgtggacactcgggcgacgcgccgtggctgggctgcttgcttccccaagtcccgcacaggcgcaaaccctcacaagggtcccacggccagctgaattggccccgctgtgcggtcggaggggcctgcgaacagatatagacgcaacgtgcacccccagaagagcaagcagcaaccagagaggcctcaatcagatttggaacgtcaagaaacagagtgtctatctgatgaacctccgcaaatcagggacccttggtcatccgggatctcttgatgaaacgacctatgaacggctggctgaggagacgcttgactccctggcagagttcttcgaggatctggctgataagccatacacgttcgaggactatgatgtttcttttggttctggcgtcctgacggtgaaactcggaggggatctgggcacttacgttatcaacaaacagactcccaataaacagatttggttgtctagtcctagcagtggcccaaaacgctatgactggacgggcaagaactgggtgtactcccacgatggagttagcctgcacgaacttctggccgctgagcttactaaagcgctgaagactaagctggatctctccagcctcgcatacagcggcaaagacgcctagctcgaggacggggtgaactacgcctgaggatccgatctttttccctctgccaaaaattatggggacatcatgaagccccttgagcatctgacttctggctaataaaggaaatttattttcattgcaatagtgtgttggaattttttgtgtctctcactcggcctaggtagataagtagcatggcgggttaatcattaactacaaggaacccctagtgatggagttggccactccctctctgcgcgctcgctcgctcactgaggccgggcgaccaaaggtcgcccgacgcccgggctttgcccgggcggcctcagtgagcgagcgagcgcgcagccttaattaacctaattcactggccgtcgttttacaacgtcgtgactgggaaaaccctggcgttacccaacttaatcgccttgcagcacatccccctttcgccagctggcgtaatagcgaagaggcccgcaccgatcgcccttcccaacagttgcgcagcctgaatggcgaatgggacgcgccctgtagcggcgcattaagcgcggcgggtgtggtggttacgcgcagcgtgaccgctacacttgccagcgccctagcgcccgctcctttcgctttcttcccttcctttctcgccacgttcgccggctttccccgtcaagctctaaatcgggggctccctttagggttccgatttagtgctttacggcacctcgaccccaaaaaacttgattagggtgatggttcacgtagtgggccatcgccctgatagacggtttttcgccctttgacgttggagtccacgttctttaatagtggactcttgttccaaactggaacaacactcaaccctatctcggtctattcttttgatttataagggattttgccgatttcggcctattggttaaaaaatgagctgatttaacaaaaatttaacgcgaattttaacaaaatattaacgcttacaatttaggtggcacttttcggggaaatgtgcgcggaacccctatttgtttatttttctaaatacattcaaatatgtatccgctcatgagacaataaccctgataaatgcttcaataatattgaaaaaggaagagtatgagtattcaacatttccgtgtcgcccttattcccttttttgcggcattttgccttcctgtttttgctcacccagaaacgctggtgaaagtaaaagatgctgaagatcagttgggtgcacgagtgggttacatcgaactggatctcaacagcggtaagatccttgagagttttcgccccgaagaacgttttccaatgatgagcacttttaaagttctgctatgtggcgcggtattatcccgtattgacgccgggcaagagcaactcggtcgccgcatacactattctcagaatgacttggttgagtactcaccagtcacagaaaagcatcttacggatggcatgacagtaagagaattatgcagtgctgccataaccatgagtgataacactgcggccaacttacttctgacaacgatcggaggaccgaaggagctaaccgcttttttgcacaacatgggggatcatgtaactcgccttgatcgttgggaaccggagctgaatgaagccataccaaacgacgagcgtgacaccacgatgcctgtagcaatggcaacaacgttgcgcaaactattaactggcgaactacttactctagcttcccggcaacaattaatagactggatggaggcggataaagttgcaggaccacttctgcgctcggcccttccggctggctggtttattgctgataaatctggagccggtgagcgtgggtctcgcggtatcattgcagcactggggccagatggtaagccctcccgtatcgtagttatctacacgacggggagtcaggcaactatggatgaacgaaatagacagatcgctgagataggtgcctcactgattaagcattggtaactgtcagaccaagtttactcatatatactttagattgatttaaaacttcatttttaatttaaaaggatctaggtgaagatcctttttgataatctcatgaccaaaatcccttaacgtgagttttcgttccactgagcgtcagaccccgtagaaaagatcaaaggatcttcttgagatcctttttttctgcgcgtaatctgctgcttgcaaacaaaaaaaccaccgctaccagcggtggtttgtttgccggatcaagagctaccaactctttttccgaaggtaactggcttcagcagagcgcagataccaaatactgttcttctagtgtagccgtagttaggccaccacttcaagaactctgtagcaccgcctacatacctcgctctgctaatcctgttaccagtggctgctgccagtggcgataagtcgtgtcttaccgggttggactcaagacgatagttaccggataaggcgcagcggtcgggctgaacggggggttcgtgcacacagcccagcttggagcgaacgacctacaccgaactgagatacctacagcgtgagctatgagaaagcgccacgcttcccgaagggagaaaggcggacaggtatccggtaagcggcagggtcggaacaggagagcgcacgagggagcttccagggggaaacgcctggtatctttatagtcctgtcgggtttcgccacctctgacttgagcgtcgatttttgtgatgctcgtcaggggggcggagcctatggaaaaacgccagcaacgcggcctttttacggttcctggccttttgctggccttttgctcacatgttctttcctgcgttatcccctgattctgtggataaccgtattaccgcctttgagtgagctgataccgctcgccgcagccgaacgaccgagcgcagcgagtcagtgagcgaggaagcggaagagcgcccaatacgcaaaccgcctctccccgcgcgttggccgattcattaatgcagctggcacgacaggtttcccgactggaaagcgggcagtgagcgcaacgcaattaatgtgagttagctcactcattaggcaccccaggctttacactttatgcttccggctcgtatgttgtgtggaattgtgagcggataa

SEQ ID NO: 75 - DNA, 4808 bp, Artificial Sequence
  Description of Artificial Sequence: Synthetic polynucleotide
caatttcacacaggaaacagctatgaccatgattacgccagatttaattaaggccttaattaggctgcgcgctcgctcgctcactgaggccgcccgggcaaagcccgggcgtcgggcgacctttggtcgcccggcctcagtgagcgagcgagcgcgcagagagggagtgtagccatgctctaggaagatcaattcaattcacgcgtcgacattgattattgactagttattaatagtaatcaattacggggtcattagttcatagcccatatatggagttccgcgttacataacttacggtaaatggcccgcctggctgaccgcccaacgacccccgcccattgacgtcaataatgacgtatgttcccatagtaacgccaatagggactttccattgacgtcaatgggtggagtatttacggtaaactgcccacttggcagtacatcaagtgtatcatatgccaagtacgccccctattgacgtcaatgacggtaaatggcccgcctggcattatgcccagtacatgaccttatgggactttcctacttggcagtacatctacgtattagtcatcgctattaccatggtgatgcggttttggcagtacatcaatgggcgtggatagcggtttgactcacggggatttccaagtctccaccccattgacgtcaatgggagtttgttttggcaccaaaatcaacgggactttccaaaatgtcgtaacaactccgccccattgacgcaaatgggcggtaggcgtgtacggtgggaggtctatataagcagagctctctggctaactagagaacccactgcttactggcttatcgaaattaatacgactcactatagggagacccaagctggctagcgtttaaacttcgggagcaagcttgaactgaaaaaccagaaagttaactggtaagtttagtctttttgtcttttatttcaggtcccggatccggtggtggtgcaaatcaaagaactgctcctcagtggatgttgcctttacttctaggcctgtacggaagtgttacttctgctctaaaagctgcggaattgtacccgcggccgatccaccggtatgtggactctgggtcgacgcgccgtagccggtctcttggcctccccatcccctgcgcaggcacagacccttacacgagttccacggcccgctgaactggcaccactctgcggacgccggggcctgagaaccgatattgacgctacgtgcactccccgacgagcctcttctaatcagagggggctcaaccagatctggaacgtgaagaagcagtcagtctacttgatgaatctgagaaagagcgggacccttgggcaccccgggtctctcgacgagactacatacgagaggctggccgaggagactttggactctctcgccgaattcttcgaggatttggcagacaagccgtacacctttgaagactacgatgtctcattcggatcaggggtgctgacggttaaactggggggcgatctcggaacctacgtcataaacaaacagacacccaataagcagatctggttgtctagcccatcatccggtcctaaacggtacgactggaccggcaagaactgggtctactcccatgacggagtcagtcttcatgaactgcttgccgcagagctgaccaaggctcttaagacgaaactggatctctctagcctggcctactccgggaaggatgcatagctcgaggacggggtgaactacgcctgaggatccgatctttttccctctgccaaaaattatggggacatcatgaagccccttgagcatctgacttctggctaataaaggaaatttattttcattgcaatagtgtgttggaattttttgtgtctctcactcggcctaggtagataagtagcatggcgggttaatcattaactacaaggaacccctagtgatggagttggccactccctctctgcgcgctcgctcgctcactgaggccgggcgaccaaaggtcgcccgacgcccgggctttgcccgggcggcctcagtgagcgagcgagcgcgcagccttaattaacctaattcactggccgtcgttttacaacgtcgtgactgggaaaaccctggcgttacccaacttaatcgccttgcagcacatccccctttcgccagctggcgtaatagcgaagaggcccgcaccgatcgcccttcccaacagttgcgcagcctgaatggcgaatgggacgcgccctgtagcggcgcattaagcgcggcgggtgtggtggttacgcgcagcgtgaccgctacacttgccagcgccctagcgcccgctcctttcgctttcttcccttcctttctcgccacgttcgccggctttccccgtcaagctctaaatcgggggctccctttagggttccgatttagtgctttacggcacctcgaccccaaaaaacttgattagggtgatggttcacgtagtgggccatcgccctgatagacggtttttcgccctttgacgttggagtccacgttctttaatagtggactcttgttccaaactggaacaacactcaaccctatctcggtctattcttttgatttataagggattttgccgatttcggcctattggttaaaaaatgagctgatttaacaaaaatttaacgcgaattttaacaaaatattaacgcttacaatttaggtggcacttttcggggaaatgtgcgcggaacccctatttgtttatttttctaaatacattcaaatatgtatccgctcatgagacaataaccctgataaatgcttcaataatattgaaaaaggaagagtatgagtattcaacatttccgtgtcgcccttattcccttttttgcggcattttgccttcctgtttttgctcacccagaaacgctggtgaaagtaaaagatgctgaagatcagttgggtgcacgagtgggttacatcgaactggatctcaacagcggtaagatccttgagagttttcgccccgaagaacgttttccaatgatgagcacttttaaagttctgctatgtggcgcggtattatcccgtattgacgccgggcaagagcaactcggtcgccgcatacactattctcagaatgacttggttgagtactcaccagtcacagaaaagcatcttacggatggcatgacagtaagagaattatgcagtgctgccataaccatgagtgataacactgcggccaacttacttctgacaacgatcggaggaccgaaggagctaaccgcttttttgcacaacatgggggatcatgtaactcgccttgatcgttgggaaccggagctgaatgaagccataccaaacgacgagcgtgacaccacgatgcctgtagcaatggcaacaacgttgcgcaaactattaactggcgaactacttactctagcttcccggcaacaattaatagactggatggaggcggataaagttgcaggaccacttctgcgctcggcccttccggctggctggtttattgctgataaatctggagccggtgagcgtgggtctcgcggtatcattgcagcactggggccagatggtaagccctcccgtatcgtagttatctacacgacggggagtcaggcaactatggatgaacgaaatagacagatcgctgagataggtgcctcactgattaagcattggtaactgtcagaccaagtttactcatatatactttagattgatttaaaacttcatttttaatttaaaaggatctaggtgaagatcctttttgataatctcatgaccaaaatcccttaacgtgagttttcgttccactgagcgtcagaccccgtagaaaagatcaaaggatcttcttgagatcctttttttctgcgcgtaatctgctgcttgcaaacaaaaaaaccaccgctaccagcggtggtttgtttgccggatcaagagctaccaactctttttccgaaggtaactggcttcagcagagcgcagataccaaatactgttcttctagtgtagccgtagttaggccaccacttcaagaactctgtagcaccgcctacatacctcgctctgctaatcctgttaccagtggctgctgccagtggcgataagtcgtgtcttaccgggttggactcaagacgatagttaccggataaggcgcagcggtcgggctgaacggggggttcgtgcacacagcccagcttggagcgaacgacctacaccgaactgagatacctacagcgtgagctatgagaaagcgccacgcttcccgaagggagaaaggcggacaggtatccggtaagcggcagggtcggaacaggagagcgcacgagggagcttccagggggaaacgcctggtatctttatagtcctgtcgggtttcgccacctctgacttgagcgtcgatttttgtgatgctcgtcaggggggcggagcctatggaaaaacgccagcaacgcggcctttttacggttcctggccttttgctggccttttgctcacatgttctttcctgcgttatcccctgattctgtggataaccgtattaccgcctttgagtgagctgataccgctcgccgcagccgaacgaccgagcgcagcgagtcagtgagcgaggaagcggaagagcgcccaatacgcaaaccgcctctccccgcgcgttggccgattcattaatgcagctggcacgacaggtttcccgactggaaagcgggcagtgagcgcaacgcaattaatgtgagttagctcactcattaggcaccccaggctttacactttatgcttccggctcgtatgttgtgtggaattgtgagcggataa

SEQ ID NO: 76 - DNA, 4808 bp, Artificial Sequence
  Description of Artificial Sequence: Synthetic polynucleotide
caatttcacacaggaaacagctatgaccatgattacgccagatttaattaaggccttaattaggctgcgcgctcgctcgctcactgaggccgcccgggcaaagcccgggcgtcgggcgacctttggtcgcccggcctcagtgagcgagcgagcgcgcagagagggagtgtagccatgctctaggaagatcaattcaattcacgcgtcgacattgattattgactagttattaatagtaatcaattacggggtcattagttcatagcccatatatggagttccgcgttacataacttacggtaaatggcccgcctggctgaccgcccaacgacccccgcccattgacgtcaataatgacgtatgttcccatagtaacgccaatagggactttccattgacgtcaatgggtggagtatttacggtaaactgcccacttggcagtacatcaagtgtatcatatgccaagtacgccccctattgacgtcaatgacggtaaatggcccgcctggcattatgcccagtacatgaccttatgggactttcctacttggcagtacatctacgtattagtcatcgctattaccatggtgatgcggttttggcagtacatcaatgggcgtggatagcggtttgactcacggggatttccaagtctccaccccattgacgtcaatgggagtttgttttggcaccaaaatcaacgggactttccaaaatgtcgtaacaactccgccccattgacgcaaatgggcggtaggcgtgtacggtgggaggtctatataagcagagctctctggctaactagagaacccactgcttactggcttatcgaaattaatacgactcactatagggagacccaagctggctagcgtttaaacttcgggagcaagcttgaactgaaaaaccagaaagttaactggtaagtttagtctttttgtcttttatttcaggtcccggatccggtggtggtgcaaatcaaagaactgctcctcagtggatgttgcctttacttctaggcctgtacggaagtgttacttctgctctaaaagctgcggaattgtacccgcggccgatccaccggtatgtggactctcgggcgacgcgccgtagccggtctcctggcttccccaagccctgcacaggcacagaccctcacacgggtcccacggccagctgaattggccccactctgcggtcgccggggcctgcgaaccgatatagacgcaacgtgcactccccgacgagcaagttccaaccagagagggctcaaccagatttggaacgtcaagaagcagagtgtctatttgatgaatctgagaaaatccgggacccttgggcaccccggatctcttgatgaaactacctatgaaaggctggccgaggagacgctggactctctggcagagttcttcgaggatctggcagacaagccatacacgtttgaggactatgatgtctcttttggatctggcgtcctgacggttaaactgggaggggatctcggaacctacgttatcaacaaacagactcccaataagcagatctggttgtctagtccatccagtggtcctaaacgctatgactggacgggcaagaactgggtgtactcccacgacggagttagccttcatgaactgctggccgcagagctgactaaagctcttaagactaaactggatctctctagcctggcctactccgggaaagatgcctagctcgaggacggggtgaactacgcctgaggatccgatctttttccctctgccaaaaattatggggacatcatgaagccccttgagcatctgacttctggctaataaaggaaatttattttcattgcaatagtgtgttggaattttttgtgtctctcactcggcctaggtagataagtagcatggcgggttaatcattaactacaaggaacccctagtgatggagttggccactccctctctgcgcgctcgctcgctcactgaggccgggcgaccaaaggtcgcccgacgcccgggctttgcccgggcggcctcagtgagcgagcgagcgcgcagccttaattaacctaattcactggccgtcgttttacaacgtcgtgactgggaaaaccctggcgttacccaacttaatcgccttgcagcacatccccctttcgccagctggcgtaatagcgaagaggcccgcaccgatcgcccttcccaacagttgcgcagcctgaatggcgaatgggacgcgccctgtagcggcgcattaagcgcggcgggtgtggtggttacgcgcagcgtgaccgctacacttgccagcgccctagcgcccgctcctttcgctttcttcccttcctttctcgccacgttcgccggctttccccgtcaagctctaaatcgggggctccctttagggttccgatttagtgctttacggcacctcgaccccaaaaaacttgattagggtgatggttcacgtagtgggccatcgccctgatagacggtttttcgccctttgacgttggagtccacgttctttaatagtggactcttgttccaaactggaacaacactcaaccctatctcggtctattcttttgatttataagggattttgccgatttcggcctattggttaaaaaatgagctgatttaacaaaaatttaacgcgaattttaacaaaatattaacgcttacaatttaggtggcacttttcggggaaatgtgcgcggaacccctatttgtttatttttctaaatacattcaaatatgtatccgctcatgagacaataaccctgataaatgcttcaataatattgaaaaaggaagagtatgagtattcaacatttccgtgtcgcccttattcccttttttgcggcattttgccttcctgtttttgctcacccagaaacgctggtgaaagtaaaagatgctgaagatcagttgggtgcacgagtgggttacatcgaactggatctcaacagcggtaagatccttgagagttttcgccccgaagaacgttttccaatgatgagcacttttaaagttctgctatgtggcgcggtattatcccgtattgacgccgggcaagagcaactcggtcgccgcatacactattctcagaatgacttggttgagtactcaccagtcacagaaaagcatcttacggatggcatgacagtaagagaattatgcagtgctgccataaccatgagtgataacactgcggccaacttacttctgacaacgatcggaggaccgaaggagctaaccgcttttttgcacaacatgggggatcatgtaactcgccttgatcgttgggaaccggagctgaatgaagccataccaaacgacgagcgtgacaccacgatgcctgtagcaatggcaacaacgttgcgcaaactattaactggcgaactacttactctagcttcccggcaacaattaatagactggatggaggcggataaagttgcaggaccacttctgcgctcggcccttccggctggctggtttattgctgataaatctggagccggtgagcgtgggtctcgcggtatcattgcagcactggggccagatggtaagccctcccgtatcgtagttatctacacgacggggagtcaggcaactatggatgaacgaaatagacagatcgctgagataggtgcctcactgattaagcattggtaactgtcagaccaagtttactcatatatactttagattgatttaaaacttcatttttaatttaaaaggatctaggtgaagatcctttttgataatctcatgaccaaaatcccttaacgtgagttttcgttccactgagcgtcagaccccgtagaaaagatcaaaggatcttcttgagatcctttttttctgcgcgtaatctgctgcttgcaaacaaaaaaaccaccgctaccagcggtggtttgtttgccggatcaagagctaccaactctttttccgaaggtaactggcttcagcagagcgcagataccaaatactgttcttctagtgtagccgtagttaggccaccacttcaagaactctgtagcaccgcctacatacctcgctctgctaatcctgttaccagtggctgctgccagtggcgataagtcgtgtcttaccgggttggactcaagacgatagttaccggataaggcgcagcggtcgggctgaacggggggttcgtgcacacagcccagcttggagcgaacgacctacaccgaactgagatacctacagcgtgagctatgagaaagcgccacgcttcccgaagggagaaaggcggacaggtatccggtaagcggcagggtcggaacaggagagcgcacgagggagcttccagggggaaacgcctggtatctttatagtcctgtcgggtttcgccacctctgacttgagcgtcgatttttgtgatgctcgtcaggggggcggagcctatggaaaaacgccagcaacgcggcctttttacggttcctggccttttgctggccttttgctcacatgttctttcctgcgttatcccctgattctgtggataaccgtattaccgcctttgagtgagctgataccgctcgccgcagccgaacgaccgagcgcagcgagtcagtgagcgaggaagcggaagagcgcccaatacgcaaaccgcctctccccgcgcgttggccgattcattaatgcagctggcacgacaggtttcccgactggaaagcgggcagtgagcgcaacgcaattaatgtgagttagctcactcattaggcaccccaggctttacactttatgcttccggctcgtatgttgtgtggaattgtgagcggataa

SEQ ID NO: 77 - DNA, 4808 bp, Artificial Sequence
  Description of Artificial Sequence: Synthetic polynucleotide
caatttcacacaggaaacagctatgaccatgattacgccagatttaattaaggccttaattaggctgcgcgctcgctcgctcactgaggccgcccgggcaaagcccgggcgtcgggcgacctttggtcgcccggcctcagtgagcgagcgagcgcgcagagagggagtgtagccatgctctaggaagatcaattcaattcacgcgtcgacattgattattgactagttattaatagtaatcaattacggggtcattagttcatagcccatatatggagttccgcgttacataacttacggtaaatggcccgcctggctgaccgcccaacgacccccgcccattgacgtcaataatgacgtatgttcccatagtaacgccaatagggactttccattgacgtcaatgggtggagtatttacggtaaactgcccacttggcagtacatcaagtgtatcatatgccaagtacgccccctattgacgtcaatgacggtaaatggcccgcctggcattatgcccagtacatgaccttatgggactttcctacttggcagtacatctacgtattagtcatcgctattaccatggtgatgcggttttggcagtacatcaatgggcgtggatagcggtttgactcacggggatttccaagtctccaccccattgacgtcaatgggagtttgttttggcaccaaaatcaacgggactttccaaaatgtcgtaacaactccgccccattgacgcaaatgggcggtaggcgtgtacggtgggaggtctatataagcagagctctctggctaactagagaacccactgcttactggcttatcgaaattaatacgactcactatagggagacccaagctggctagcgtttaaacttcgggagcaagcttgaactgaaaaaccagaaagttaactggtaagtttagtctttttgtcttttatttcaggtcccggatccggtggtggtgcaaatcaaagaactgctcctcagtggatgttgcctttacttctaggcctgtacggaagtgttacttctgctctaaaagctgcggaattgtacccgcggccgatccaccggtatgtggactctggggcgacgcgccgtggccgggctcctggcatccccatcccctgcgcaggcgcaaaccctcacacgggttccacggccagctgaactggccccactgtgcggccggcggggcctgagaacagatattgacgcaacgtgcactcccagaagagccagcagcaaccagagggggttgaatcagatctggaacgtcaagaagcagtcagtgtacctgatgaatctccgaaaaagcgggacccttggtcaccccggatctctcgatgaaaccacatatgaacggctggccgaggaaacgctggactccctggccgagttcttcgaggacctggcagacaagccgtacaccttcgaagactatgatgtttcattcggaagtggcgtgctgacggtcaaactgggaggcgatctgggaacctacgttataaacaaacagactcccaataaacagatctggttgtctagtccatccagcggtcctaaacgctatgactggacgggcaagaactgggtctactcccacgacggagttagccttcacgaactgttggccgcagagctgacaaaggcgcttaagacgaaactggatctctctagcctggcctactccggcaaagatgcctagctcgaggacggggtgaactacgcctgaggatccgatctttttccctctgccaaaaattatggggacatcatgaagccccttgagcatctgacttctggctaataaaggaaatttattttcattgcaatagtgtgttggaattttttgtgtctctcactcggcctaggtagataagtagcatggcgggttaatcattaactacaaggaacccctagtgatggagttggccactccctctctgcgcgctcgctcgctcactgaggccgggcgaccaaaggtcgcccgacgcccgggctttgcccgggcggcctcagtgagcgagcgagcgcgcagccttaattaacctaattcactggccgtcgttttacaacgtcgtgactgggaaaaccctggcgttacccaacttaatcgccttgcagcacatccccctttcgccagctggcgtaatagcgaagaggcccgcaccgatcgcccttcccaacagttgcgcagcctgaatggcgaatgggacgcgccctgtagcggcgcattaagcgcggcgggtgtggtggttacgcgcagcgtgaccgctacacttgccagcgccctagcgcccgctcctttcgctttcttcccttcctttctcgccacgttcgccggctttccccgtcaagctctaaatcgggggctccctttagggttccgatttagtgctttacggcacctcgaccccaaaaaacttgattagggtgatggttcacgtagtgggccatcgccctgatagacggtttttcgccctttgacgttggagtccacgttctttaatagtggactcttgttccaaactggaacaacactcaaccctatctcggtctattcttttgatttataagggattttgccgatttcggcctattggttaaaaaatgagctgatttaacaaaaatttaacgcgaattttaacaaaatattaacgcttacaatttaggtggcacttttcggggaaatgtgcgcggaacccctatttgtttatttttctaaatacattcaaatatgtatccgctcatgagacaataaccctgataaatgcttcaataatattgaaaaaggaagagtatgagtattcaacatttccgtgtcgcccttattcccttttttgcggcattttgccttcctgtttttgctcacccagaaacgctggtgaaagtaaaagatgctgaagatcagttgggtgcacgagtgggttacatcgaactggatctcaacagcggtaagatccttgagagttttcgccccgaagaacgttttccaatgatgagcacttttaaagttctgctatgtggcgcggtattatcccgtattgacgccgggcaagagcaactcggtcgccgcatacactattctcagaatgacttggttgagtactcaccagtcacagaaaagcatcttacggatggcatgacagtaagagaattatgcagtgctgccataaccatgagtgataacactgcggccaacttacttctgacaacgatcggaggaccgaaggagctaaccgcttttttgcacaacatgggggatcatgtaactcgccttgatcgttgggaaccggagctgaatgaagccataccaaacgacgagcgtgacaccacgatgcctgtagcaatggcaacaacgttgcgcaaactattaactggcgaactacttactctagcttcccggcaacaattaatagactggatggaggcggataaagttgcaggaccacttctgcgctcggcccttccggctggctggtttattgctgataaatctggagccggtgagcgtgggtctcgcggtatcattgcagcactggggccagatggtaagccctcccgtatcgtagttatctacacgacggggagtcaggcaactatggatgaacgaaatagacagatcgctgagataggtgcctcactgattaagcattggtaactgtcagaccaagtttactcatatatactttagattgatttaaaacttcatttttaatttaaaaggatctaggtgaagatcctttttgataatctcatgaccaaaatcccttaacgtgagttttcgttccactgagcgtcagaccccgtagaaaagatcaaaggatcttcttgagatcctttttttctgcgcgtaatctgctgcttgcaaacaaaaaaaccaccgctaccagcggtggtttgtttgccggatcaagagctaccaactctttttccgaaggtaactggcttcagcagagcgcagataccaaatactgttcttctagtgtagccgtagttaggccaccacttcaagaactctgtagcaccgcctacatacctcgctctgctaatcctgttaccagtggctgctgccagtggcgataagtcgtgtcttaccgggttggactcaagacgatagttaccggataaggcgcagcggtcgggctgaacggggggttcgtgcacacagcccagcttggagcgaacgacctacaccgaactgagatacctacagcgtgagctatgagaaagcgccacgcttcccgaagggagaaaggcggacaggtatccggtaagcggcagggtcggaacaggagagcgcacgagggagcttccagggggaaacgcctggtatctttatagtcctgtcgggtttcgccacctctgacttgagcgtcgatttttgtgatgctcgtcaggggggcggagcctatggaaaaacgccagcaacgcggcctttttacggttcctggccttttgctggccttttgctcacatgttctttcctgcgttatcccctgattctgtggataaccgtattaccgcctttgagtgagctgataccgctcgccgcagccgaacgaccgagcgcagcgagtcagtgagcgaggaagcggaagagcgcccaatacgcaaaccgcctctccccgcgcgttggccgattcattaatgcagctggcacgacaggtttcccgactggaaagcgggcagtgagcgcaacgcaattaatgtgagttagctcactcattaggcaccccaggctttacactttatgcttccggctcgtatgttgtgtggaattgtgagcggataa

SEQ ID NO: 78 - DNA, 4863 bp, Artificial Sequence
  Description of Artificial Sequence: Synthetic polynucleotide
caatttcacacaggaaacagctatgaccatgattacgccagatttaattaaggccttaattaggctgcgcgctcgctcgctcactgaggccgcccgggcaaagcccgggcgtcgggcgacctttggtcgcccggcctcagtgagcgagcgagcgcgcagagagggagtgtagccatgctctaggaagatcaattcaattcacgcgtcgacattgattattgactagttattaatagtaatcaattacggggtcattagttcatagcccatatatggagttccgcgttacataacttacggtaaatggcccgcctggctgaccgcccaacgacccccgcccattgacgtcaataatgacgtatgttcccatagtaacgccaatagggactttccattgacgtcaatgggtggagtatttacggtaaactgcccacttggcagtacatcaagtgtatcatatgccaagtacgccccctattgacgtcaatgacggtaaatggcccgcctggcattatgcccagtacatgaccttatgggactttcctacttggcagtacatctacgtattagtcatcgctattaccatggtgatgcggttttggcagtacatcaatgggcgtggatagcggtttgactcacggggatttccaagtctccaccccattgacgtcaatgggagtttgttttggcaccaaaatcaacgggactttccaaaatgtcgtaacaactccgccccattgacgcaaatgggcggtaggcgtgtacggtgggaggtctatataagcagagctctctggctaactagagaacccactgcttactggcttatcgaaattaatacgactcactatagggagacccaagctggctagcgtttaaacttcgggagcaagcttgaactgaaaaaccagaaagttaactggtaagtttagtctttttgtcttttatttcaggtcccggatccggtggtggtgcaaatcaaagaactgctcctcagtggatgttgcctttacttctaggcctgtacggaagtgttacttctgctctaaaagctgcggaattgtacccgcggccgatccaccggtgccgccaccatgtggactctcgggcgccgcgcagtagccggcctcctggcgtcacccagcccagcccaggcccagaccctcacccgggtcccgcggccggcagagttggccccactctgcggccgccgtggcctgcgcaccgacatcgatgcgacctgcacgccccgccgcgcaagttcgaaccaacgtggcctcaaccagatttggaatgtcaaaaagcagagtgtctatttgatgaatttgaggaaatctggaactttgggccacccaggctctctagatgagaccacctatgaaagactagcagaggaaacgctggactctttagcagagttttttgaagaccttgcagacaagccatacacgtttgaggactatgatgtctcctttgggagtggtgtcttaactgtcaaactgggtggagatctaggaacctatgtgatcaacaagcagacgccaaacaagcaaatctggctatcttctccatccagtggacctaagcgttatgactggactgggaaaaactgggtgtactcccacgacggcgtgtccctccatgagctgctggccgcagagctcactaaagccttaaaaaccaaactggacttgtcttccttggcctattccggaaaagatgcttgagcggccctagcgtttaaacgggccctctagagtcgacccgggcggcctcgaggacggggtgaactacgcctgaggatccgatctttttccctctgccaaaaattatggggacatcatgaagccccttgagcatctgacttctggctaataaaggaaatttattttcattgcaatagtgtgttggaattttttgtgtctctcactcggcctaggtagataagtagcatggcgggttaatcattaactacaaggaacccctagtgatggagttggccactccctctctgcgcgctcgctcgctcactgaggccgggcgaccaaaggtcgcccgacgcccgggctttgcccgggcggcctcagtgagcgagcgagcgcgcagccttaattaacctaattcactggccgtcgttttacaacgtcgtgactgggaaaaccctggcgttacccaacttaatcgccttgcagcacatccccctttcgccagctggcgtaatagcgaagaggcccgcaccgatcgcccttcccaacagttgcgcagcctgaatggcgaatgggacgcgccctgtagcggcgcattaagcgcggcgggtgtggtggttacgcgcagcgtgaccgctacacttgccagcgccctagcgcccgctcctttcgctttcttcccttcctttctcgccacgttcgccggctttccccgtcaagctctaaatcgggggctccctttagggttccgatttagtgctttacggcacctcgaccccaaaaaacttgattagggtgatggttcacgtagtgggccatcgccctgatagacggtttttcgccctttgacgttggagtccacgttctttaatagtggactcttgttccaaactggaacaacactcaaccctatctcggtctattcttttgatttataagggattttgccgatttcggcctattggttaaaaaatgagctgatttaacaaaaatttaacgcgaattttaacaaaatattaacgcttacaatttaggtggcacttttcggggaaatgtgcgcggaacccctatttgtttatttttctaaatacattcaaatatgtatccgctcatgagacaataaccctgataaatgcttcaataatattgaaaaaggaagagtatgagtattcaacatttccgtgtcgcccttattcccttttttgcggcattttgccttcctgtttttgctcacccagaaacgctggtgaaagtaaaagatgctgaagatcagttgggtgcacgagtgggttacatcgaactggatctcaacagcggtaagatccttgagagttttcgccccgaagaacgttttccaatgatgagcacttttaaagttctgctatgtggcgcggtattatcccgtattgacgccgggcaagagcaactcggtcgccgcatacactattctcagaatgacttggttgagtactcaccagtcacagaaaagcatcttacggatggcatgacagtaagagaattatgcagtgctgccataaccatgagtgataacactgcggccaacttacttctgacaacgatcggaggaccgaaggagctaaccgcttttttgcacaacatgggggatcatgtaactcgccttgatcgttgggaaccggagctgaatgaagccataccaaacgacgagcgtgacaccacgatgcctgtagcaatggcaacaacgttgcgcaaactattaactggcgaactacttactctagcttcccggcaacaattaatagactggatggaggcggataaagttgcaggaccacttctgcgctcggcccttccggctggctggtttattgctgataaatctggagccggtgagcgtgggtctcgcggtatcattgcagcactggggccagatggtaagccctcccgtatcgtagttatctacacgacggggagtcaggcaactatggatgaacgaaatagacagatcgctgagataggtgcctcactgattaagcattggtaactgtcagaccaagtttactcatatatactttagattgatttaaaacttcatttttaatttaaaaggatctaggtgaagatcctttttgataatctcatgaccaaaatcccttaacgtgagttttcgttccactgagcgtcagaccccgtagaaaagatcaaaggatcttcttgagatcctttttttctgcgcgtaatctgctgcttgcaaacaaaaaaaccaccgctaccagcggtggtttgtttgccggatcaagagctaccaactctttttccgaaggtaactggcttcagcagagcgcagataccaaatactgttcttctagtgtagccgtagttaggccaccacttcaagaactctgtagcaccgcctacatacctcgctctgctaatcctgttaccagtggctgctgccagtggcgataagtcgtgtcttaccgggttggactcaagacgatagttaccggataaggcgcagcggtcgggctgaacggggggttcgtgcacacagcccagcttggagcgaacgacctacaccgaactgagatacctacagcgtgagctatgagaaagcgccacgcttcccgaagggagaaaggcggacaggtatccggtaagcggcagggtcggaacaggagagcgcacgagggagcttccagggggaaacgcctggtatctttatagtcctgtcgggtttcgccacctctgacttgagcgtcgatttttgtgatgctcgtcaggggggcggagcctatggaaaaacgccagcaacgcggcctttttacggttcctggccttttgctggccttttgctcacatgttctttcctgcgttatcccctgattctgtggataaccgtattaccgcctttgagtgagctgataccgctcgccgcagccgaacgaccgagcgcagcgagtcagtgagcgaggaagcggaagagcgcccaatacgcaaaccgcctctccccgcgcgttggccgattcattaatgcagctggcacgacaggtttcccgactggaaagcgggcagtgagcgcaacgcaattaatgtgagttagctcactcattaggcaccccaggctttacactttatgcttccggctcgtatgttgtgtggaattgtgagcggataa

SEQ ID NO: 79 - DNA, 5533 bp, Artificial Sequence
  Description of Artificial Sequence: Synthetic polynucleotide
caatttcacacaggaaacagctatgaccatgattacgccagatttaattaaggccttaattaggctgcgcgctcgctcgctcactgaggccgcccgggcaaagcccgggcgtcgggcgacctttggtcgcccggcctcagtgagcgagcgagcgcgcagagagggagtgtagccatgctctaggaagatcaattcaattcacgcgtactatagctagagctcccaggctcaagtgatcctcccgcctcagcctcctgagtagctgagatcacaggcatgcactaccacactcggctcacatttgacatcctctaaagcatatataaaatgtgaagaaaactttcacaatttgcatccctttgtaatatgtaacagaaataaaattctcttttaaaatctatcaacaataggcaaggcacggtggctcacgcctgtcgtctcagcactttgtgaggcccaggcgggcagatcgtttgagcctagaagttcaagaccaccctgggcaacatagcgaaaccccctttctacaaaaaatacaaaaactagctgggtgtggtggtgcacacctgtagtcccagctacttggaaggctgaaatgggaagactgcttgagcccgggagggagaagttgcagtaagccaggaccacaccactgcactccagcctgggcaacagagtgagactctgtctcaaacaaacaaataaatgaggcgggtggatcacgaggtcagtagatcgagaccatcctggctaacacggtgaaacccgtctctactaaaaaaaaaaaaaaatacaaaaaattagccaggcatggtggcgggcgcctgtagtcccagttactcgggaggctgaggcaggagaatggcgtgaaaccgggaggcagagcttgcagtgagccgagatcgcaccactgccctccagcctgggcgacagagcgagactccgtctcaatcaatcaatcaatcaataaaatctattaacaatatttattgtgcacttaacaggaacatgccctgtccaaaaaaaactttacagggcttaactcattttatccttaccacaatcctatgaagtaggaacttttataaaacgcattttataaacaaggcacagagaggttaattaacttgccctctggtcacacagctaggaagtgggcagagtacagatttacacaaggcatccgtctcctggccccacatacccaactgctgtaaacccataccggcggccaagcagcctcaatttgtgcatgcacccacttcccagcaagacagcagctcccaagttcctcctgtttagaattttagaagcggcgggccaccaggctgcagtctcccttgggtcaggggtcctggttgcactccgtgctttgcacaaagcaggctctccatttttgttaaatgcacgaatagtgctaagctgggaagttcttcctgaggtctaacctctagctgctcccccacagaagagtgcctgcggccagtggccaccaggggtcgccgcagcacccagcgctggagggcggagcgggcggcagacccggagcagcaagtggactctctcgagaagcttgaactgaaaaaccagaaagttaactggtaagtttagtctttttgtcttttatttcaggtcccggatccggtggtggtgcaaatcaaagaactgctcctcagtggatgttgcctttacttctaggcctgtacggaagtgttacttctgctctaaaagctgcggaattgtacccgcggccgatccaccggtatgtggactctcgggcgccgcgcagtagccggcctcctggcgtcacccagcccagcccaggcccagaccctcacccgggtcccgcggccggcagagttggccccactctgcggccgccgtggcctgcgcaccgacatcgatgcgacctgcacgccccgccgcgcaagttcgaaccaacgtggcctcaaccagatttggaatgtcaaaaagcagagtgtctatttgatgaatttgaggaaatctggaactttgggccacccaggctctctagatgagaccacctatgaaagactagcagaggaaacgctggactctttagcagagttttttgaagaccttgcagacaagccatacacgtttgaggactatgatgtctcctttgggagtggtgtcttaactgtcaaactgggtggagatctaggaacctatgtgatcaacaagcagacgccaaacaagcaaatctggctatcttctccatccagtggacctaagcgttatgactggactgggaaaaactgggtgtactcccacgacggcgtgtccctccatgagctgctggccgcagagctcactaaagccttaaaaaccaaactggacttgtcttccttggcctattccggaaaagatgcttgagcggccctagcgtttaaacgggccctctagagtcgacccgggcggcctcgaggacggggtgaactacgcctgaggatccgatctttttccctctgccaaaaattatggggacatcatgaagccccttgagcatctgacttctggctaataaaggaaatttattttcattgcaatagtgtgttggaattttttgtgtctctcactcggcctaggtagataagtagcatggcgggttaatcattaactacaaggaacccctagtgatggagttggccactccctctctgcgcgctcgctcgctcactgaggccgggcgaccaaaggtcgcccgacgcccgggctttgcccgggcggcctcagtgagcgagcgagcgcgcagccttaattaacctaattcactggccgtcgttttacaacgtcgtgactgggaaaaccctggcgttacccaacttaatcgccttgcagcacatccccctttcgccagctggcgtaatagcgaagaggcccgcaccgatcgcccttcccaacagttgcgcagcctgaatggcgaatgggacgcgccctgtagcggcgcattaagcgcggcgggtgtggtggttacgcgcagcgtgaccgctacacttgccagcgccctagcgcccgctcctttcgctttcttcccttcctttctcgccacgttcgccggctttccccgtcaagctctaaatcgggggctccctttagggttccgatttagtgctttacggcacctcgaccccaaaaaacttgattagggtgatggttcacgtagtgggccatcgccctgatagacggtttttcgccctttgacgttggagtccacgttctttaatagtggactcttgttccaaactggaacaacactcaaccctatctcggtctattcttttgatttataagggattttgccgatttcggcctattggttaaaaaatgagctgatttaacaaaaatttaacgcgaattttaacaaaatattaacgcttacaatttaggtggcacttttcggggaaatgtgcgcggaacccctatttgtttatttttctaaatacattcaaatatgtatccgctcatgagacaataaccctgataaatgcttcaataatattgaaaaaggaagagtatgagtattcaacatttccgtgtcgcccttattcccttttttgcggcattttgccttcctgtttttgctcacccagaaacgctggtgaaagtaaaagatgctgaagatcagttgggtgcacgagtgggttacatcgaactggatctcaacagcggtaagatccttgagagttttcgccccgaagaacgttttccaatgatgagcacttttaaagttctgctatgtggcgcggtattatcccgtattgacgccgggcaagagcaactcggtcgccgcatacactattctcagaatgacttggttgagtactcaccagtcacagaaaagcatcttacggatggcatgacagtaagagaattatgcagtgctgccataaccatgagtgataacactgcggccaacttacttctgacaacgatcggaggaccgaaggagctaaccgcttttttgcacaacatgggggatcatgtaactcgccttgatcgttgggaaccggagctgaatgaagccataccaaacgacgagcgtgacaccacgatgcctgtagcaatggcaacaacgttgcgcaaactattaactggcgaactacttactctagcttcccggcaacaattaatagactggatggaggcggataaagttgcaggaccacttctgcgctcggcccttccggctggctggtttattgctgataaatctggagccggtgagcgtgggtctcgcggtatcattgcagcactggggccagatggtaagccctcccgtatcgtagttatctacacgacggggagtcaggcaactatggatgaacgaaatagacagatcgctgagataggtgcctcactgattaagcattggtaactgtcagaccaagtttactcatatatactttagattgatttaaaacttcatttttaatttaaaaggatctaggtgaagatcctttttgataatctcatgaccaaaatcccttaacgtgagttttcgttccactgagcgtcagaccccgtagaaaagatcaaaggatcttcttgagatcctttttttctgcgcgtaatctgctgcttgcaaacaaaaaaaccaccgctaccagcggtggtttgtttgccggatcaagagctaccaactctttttccgaaggtaactggcttcagcagagcgcagataccaaatactgttcttctagtgtagccgtagttaggccaccacttcaagaactctgtagcaccgcctacatacctcgctctgctaatcctgttaccagtggctgctgccagtggcgataagtcgtgtcttaccgggttggactcaagacgatagttaccggataaggcgcagcggtcgggctgaacggggggttcgtgcacacagcccagcttggagcgaacgacctacaccgaactgagatacctacagcgtgagctatgagaaagcgccacgcttcccgaagggagaaaggcggacaggtatccggtaagcggcagggtcggaacaggagagcgcacgagggagcttccagggggaaacgcctggtatctttatagtcctgtcgggtttcgccacctctgacttgagcgtcgatttttgtgatgctcgtcaggggggcggagcctatggaaaaacgccagcaacgcggcctttttacggttcctggccttttgctggccttttgctcacatgttctttcctgcgttatcccctgattctgtggataaccgtattaccgcctttgagtgagctgataccgctcgccgcagccgaacgaccgagcgcagcgagtcagtgagcgaggaagcggaagagcgcccaatacgcaaaccgcctctccccgcgcgttggccgattcattaatgcagctggcacgacaggtttcccgactggaaagcgggcagtgagcgcaacgcaattaatgtgagttagctcactcattaggcaccccaggctttacactttatgcttccggctcgtatgttgtgtggaattgtgagcggataa

SEQ ID NO: 80 - DNA, 5487 bp, Artificial Sequence
  Description of Artificial Sequence: Synthetic polynucleotide
caatttcacacaggaaacagctatgaccatgattacgccagatttaattaaggccttaattaggctgcgcgctcgctcgctcactgaggccgcccgggcaaagcccgggcgtcgggcgacctttggtcgcccggcctcagtgagcgagcgagcgcgcagagagggagtgtagccatgctctaggaagatcaattcaattcacgcgtactatagctagagctcccaggctcaagtgatcctcccgcctcagcctcctgagtagctgagatcacaggcatgcactaccacactcggctcacatttgacatcctctaaagcatatataaaatgtgaagaaaactttcacaatttgcatccctttgtaatatgtaacagaaataaaattctcttttaaaatctatcaacaataggcaaggcacggtggctcacgcctgtcgtctcagcactttgtgaggcccaggcgggcagatcgtttgagcctagaagttcaagaccaccctgggcaacatagcgaaaccccctttctacaaaaaatacaaaaactagctgggtgtggtggtgcacacctgtagtcccagctacttggaaggctgaaatgggaagactgcttgagcccgggagggagaagttgcagtaagccaggaccacaccactgcactccagcctgggcaacagagtgagactctgtctcaaacaaacaaataaatgaggcgggtggatcacgaggtcagtagatcgagaccatcctggctaacacggtgaaacccgtctctactaaaaaaaaaaaaaaatacaaaaaattagccaggcatggtggcgggcgcctgtagtcccagttactcgggaggctgaggcaggagaatggcgtgaaaccgggaggcagagcttgcagtgagccgagatcgcaccactgccctccagcctgggcgacagagcgagactccgtctcaatcaatcaatcaatcaataaaatctattaacaatatttattgtgcacttaacaggaacatgccctgtccaaaaaaaactttacagggcttaactcattttatccttaccacaatcctatgaagtaggaacttttataaaacgcattttataaacaaggcacagagaggttaattaacttgccctctggtcacacagctaggaagtgggcagagtacagatttacacaaggcatccgtctcctggccccacatacccaactgctgtaaacccataccggcggccaagcagcctcaatttgtgcatgcacccacttcccagcaagacagcagctcccaagttcctcctgtttagaattttagaagcggcgggccaccaggctgcagtctcccttgggtcaggggtcctggttgcactccgtgctttgcacaaagcaggctctccatttttgttaaatgcacgaatagtgctaagctgggaagttcttcctgaggtctaacctctagctgctcccccacagaagagtgcctgcggccagtggccaccaggggtcgccgcagcacccagcgctggagggcggagcgggcggcagacccggagcagcaagtggactctctcgagaagcttgaactgaaaaaccagaaagttaactggtaagtttagtctttttgtcttttatttcaggtcccggatccggtggtggtgcaaatcaaagaactgctcctcagtggatgttgcctttacttctaggcctgtacggaagtgttacttctgctctaaaagctgcggaattgtacccgcggccgatccaccggtatgtggacactcgggcgacgcgccgtggctgggctgcttgcttccccaagtcccgcacaggcgcaaaccctcacaagggtcccacggccagctgaattggccccgctgtgcggtcggaggggcctgcgaacagatatagacgcaacgtgcacccccagaagagcaagcagcaaccagagaggcctcaatcagatttggaacgtcaagaaacagagtgtctatctgatgaacctccgcaaatcagggacccttggtcatccgggatctcttgatgaaacgacctatgaacggctggctgaggagacgcttgactccctggcagagttcttcgaggatctggctgataagccatacacgttcgaggactatgatgtttcttttggttctggcgtcctgacggtgaaactcggaggggatctgggcacttacgttatcaacaaacagactcccaataaacagatttggttgtctagtcctagcagtggcccaaaacgctatgactggacgggcaagaactgggtgtactcccacgatggagttagcctgcacgaacttctggccgctgagcttactaaagcgctgaagactaagctggatctctccagcctcgcatacagcggcaaagacgcctagctcgaggacggggtgaactacgcctgaggatccgatctttttccctctgccaaaaattatggggacatcatgaagccccttgagcatctgacttctggctaataaaggaaatttattttcattgcaatagtgtgttggaattttttgtgtctctcactcggcctaggtagataagtagcatggcgggttaatcattaactacaaggaacccctagtgatggagttggccactccctctctgcgcgctcgctcgctcactgaggccgggcgaccaaaggtcgcccgacgcccgggctttgcccgggcggcctcagtgagcgagcgagcgcgcagccttaattaacctaattcactggccgtcgttttacaacgtcgtgactgggaaaaccctggcgttacccaacttaatcgccttgcagcacatccccctttcgccagctggcgtaatagcgaagaggcccgcaccgatcgcccttcccaacagttgcgcagcctgaatggcgaatgggacgcgccctgtagcggcgcattaagcgcggcgggtgtggtggttacgcgcagcgtgaccgctacacttgccagcgccctagcgcccgctcctttcgctttcttcccttcctttctcgccacgttcgccggctttccccgtcaagctctaaatcgggggctccctttagggttccgatttagtgctttacggcacctcgaccccaaaaaacttgattagggtgatggttcacgtagtgggccatcgccctgatagacggtttttcgccctttgacgttggagtccacgttctttaatagtggactcttgttccaaactggaacaacactcaaccctatctcggtctattcttttgatttataagggattttgccgatttcggcctattggttaaaaaatgagctgatttaacaaaaatttaacgcgaattttaacaaaatattaacgcttacaatttaggtggcacttttcggggaaatgtgcgcggaacccctatttgtttatttttctaaatacattcaaatatgtatccgctcatgagacaataaccctgataaatgcttcaataatattgaaaaaggaagagtatgagtattcaacatttccgtgtcgcccttattcccttttttgcggcattttgccttcctgtttttgctcacccagaaacgctggtgaaagtaaaagatgctgaagatcagttgggtgcacgagtgggttacatcgaactggatctcaacagcggtaagatccttgagagttttcgccccgaagaacgttttccaatgatgagcacttttaaagttctgctatgtggcgcggtattatcccgtattgacgccgggcaagagcaactcggtcgccgcatacactattctcagaatgacttggttgagtactcaccagtcacagaaaagcatcttacggatggcatgacagtaagagaattatgcagtgctgccataaccatgagtgataacactgcggccaacttacttctgacaacgatcggaggaccgaaggagctaaccgcttttttgcacaacatgggggatcatgtaactcgccttgatcgttgggaaccggagctgaatgaagccataccaaacgacgagcgtgacaccacgatgcctgtagcaatggcaacaacgttgcgcaaactattaactggcgaactacttactctagcttcccggcaacaattaatagactggatggaggcggataaagttgcaggaccacttctgcgctcggcccttccggctggctggtttattgctgataaatctggagccggtgagcgtgggtctcgcggtatcattgcagcactggggccagatggtaagccctcccgtatcgtagttatctacacgacggggagtcaggcaactatggatgaacgaaatagacagatcgctgagataggtgcctcactgattaagcattggtaactgtcagaccaagtttactcatatatactttagattgatttaaaacttcatttttaatttaaaaggatctaggtgaagatcctttttgataatctcatgaccaaaatcccttaacgtgagttttcgttccactgagcgtcagaccccgtagaaaagatcaaaggatcttcttgagatcctttttttctgcgcgtaatctgctgcttgcaaacaaaaaaaccaccgctaccagcggtggtttgtttgccggatcaagagctaccaactctttttccgaaggtaactggcttcagcagagcgcagataccaaatactgttcttctagtgtagccgtagttaggccaccacttcaagaactctgtagcaccgcctacatacctcgctctgctaatcctgttaccagtggctgctgccagtggcgataagtcgtgtcttaccgggttggactcaagacgatagttaccggataaggcgcagcggtcgggctgaacggggggttcgtgcacacagcccagcttggagcgaacgacctacaccgaactgagatacctacagcgtgagctatgagaaagcgccacgcttcccgaagggagaaaggcggacaggtatccggtaagcggcagggtcggaacaggagagcgcacgagggagcttccagggggaaacgcctggtatctttatagtcctgtcgggtttcgccacctctgacttgagcgtcgatttttgtgatgctcgtcaggggggcggagcctatggaaaaacgccagcaacgcggcctttttacggttcctggccttttgctggccttttgctcacatgttctttcctgcgttatcccctgattctgtggataaccgtattaccgcctttgagtgagctgataccgctcgccgcagccgaacgaccgagcgcagcgagtcagtgagcgaggaagcggaagagcgcccaatacgcaaaccgcctctccccgcgcgttggccgattcattaatgcagctggcacgacaggtttcccgactggaaagcgggcagtgagcgcaacgcaattaatgtgagttagctcactcattaggcaccccaggctttacactttatgcttccggctcgtatgttgtgtggaattgtgagcggataa

SEQ ID NO: 81 - DNA, 5487 bp, Artificial Sequence
  Description of Artificial Sequence: Synthetic polynucleotide
caatttcacacaggaaacagctatgaccatgattacgccagatttaattaaggccttaattaggctgcgcgctcgctcgctcactgaggccgcccgggcaaagcccgggcgtcgggcgacctttggtcgcccggcctcagtgagcgagcgagcgcgcagagagggagtgtagccatgctctaggaagatcaattcaattcacgcgtactatagctagagctcccaggctcaagtgatcctcccgcctcagcctcctgagtagctgagatcacaggcatgcactaccacactcggctcacatttgacatcctctaaagcatatataaaatgtgaagaaaactttcacaatttgcatccctttgtaatatgtaacagaaataaaattctcttttaaaatctatcaacaataggcaaggcacggtggctcacgcctgtcgtctcagcactttgtgaggcccaggcgggcagatcgtttgagcctagaagttcaagaccaccctgggcaacatagcgaaaccccctttctacaaaaaatacaaaaactagctgggtgtggtggtgcacacctgtagtcccagctacttggaaggctgaaatgggaagactgcttgagcccgggagggagaagttgcagtaagccaggaccacaccactgcactccagcctgggcaacagagtgagactctgtctcaaacaaacaaataaatgaggcgggtggatcacgaggtcagtagatcgagaccatcctggctaacacggtgaaacccgtctctactaaaaaaaaaaaaaaatacaaaaaattagccaggcatggtggcgggcgcctgtagtcccagttactcgggaggctgaggcaggagaatggcgtgaaaccgggaggcagagcttgcagtgagccgagatcgcaccactgccctccagcctgggcgacagagcgagactccgtctcaatcaatcaatcaatcaataaaatctattaacaatatttattgtgcacttaacaggaacatgccctgtccaaaaaaaactttacagggcttaactcattttatccttaccacaatcctatgaagtaggaacttttataaaacgcattttataaacaaggcacagagaggttaattaacttgccctctggtcacacagctaggaagtgggcagagtacagatttacacaaggcatccgtctcctggccccacatacccaactgctgtaaacccataccggcggccaagcagcctcaatttgtgcatgcacccacttcccagcaagacagcagctcccaagttcctcctgtttagaattttagaagcggcgggccaccaggctgcagtctcccttgggtcaggggtcctggttgcactccgtgctttgcacaaagcaggctctccatttttgttaaatgcacgaatagtgctaagctgggaagttcttcctgaggtctaacctctagctgctcccccacagaagagtgcctgcggccagtggccaccaggggtcgccgcagcacccagcgctggagggcggagcgggcggcagacccggagcagcaagtggactctctcgagaagcttgaactgaaaaaccagaaagttaactggtaagtttagtctttttgtcttttatttcaggtcccggatccggtggtggtgcaaatcaaagaactgctcctcagtggatgttgcctttacttctaggcctgtacggaagtgttacttctgctctaaaagctgcggaattgtacccgcggccgatccaccggtatgtggactctgggtcgacgcgccgtagccggtctcttggcctccccatcccctgcgcaggcacagacccttacacgagttccacggcccgctgaactggcaccactctgcggacgccggggcctgagaaccgatattgacgctacgtgcactccccgacgagcctcttctaatcagagggggctcaaccagatctggaacgtgaagaagcagtcagtctacttgatgaatctgagaaagagcgggacccttgggcaccccgggtctctcgacgagactacatacgagaggctggccgaggagactttggactctctcgccgaattcttcgaggatttggcagacaagccgtacacctttgaagactacgatgtctcattcggatcaggggtgctgacggttaaactggggggcgatctcggaacctacgtcataaacaaacagacacccaataagcagatctggttgtctagcccatcatccggtcctaaacggtacgactggaccggcaagaactgggtctactcccatgacggagtcagtcttcatgaactgcttgccgcagagctgaccaaggctcttaagacgaaactggatctctctagcctggcctactccgggaaggatgcatagctcgaggacggggtgaactacgcctgaggatccgatctttttccctctgccaaaaattatggggacatcatgaagccccttgagcatctgacttctggctaataaaggaaatttattttcattgcaatagtgtgttggaattttttgtgtctctcactcggcctaggtagataagtagcatggcgggttaatcattaactacaaggaacccctagtgatggagttggccactccctctctgcgcgctcgctcgctcactgaggccgggcgaccaaaggtcgcccgacgcccgggctttgcccgggcggcctcagtgagcgagcgagcgcgcagccttaattaacctaattcactggccgtcgttttacaacgtcgtgactgggaaaaccctggcgttacccaacttaatcgccttgcagcacatccccctttcgccagctggcgtaatagcgaagaggcccgcaccgatcgcccttcccaacagttgcgcagcctgaatggcgaatgggacgcgccctgtagcggcgcattaagcgcggcgggtgtggtggttacgcgcagcgtgaccgctacacttgccagcgccctagcgcccgctcctttcgctttcttcccttcctttctcgccacgttcgccggctttccccgtcaagctctaaatcgggggctccctttagggttccgatttagtgctttacggcacctcgaccccaaaaaacttgattagggtgatggttcacgtagtgggccatcgccctgatagacggtttttcgccctttgacgttggagtccacgttctttaatagtggactcttgttccaaactggaacaacactcaaccctatctcggtctattcttttgatttataagggattttgccgatttcggcctattggttaaaaaatgagctgatttaacaaaaatttaacgcgaattttaacaaaatattaacgcttacaatttaggtggcacttttcggggaaatgtgcgcggaacccctatttgtttatttttctaaatacattcaaatatgtatccgctcatgagacaataaccctgataaatgcttcaataatattgaaaaaggaagagtatgagtattcaacatttccgtgtcgcccttattcccttttttgcggcattttgccttcctgtttttgctcacccagaaacgctggtgaaagtaaaagatgctgaagatcagttgggtgcacgagtgggttacatcgaactggatctcaacagcggtaagatccttgagagttttcgccccgaagaacgttttccaatgatgagcacttttaaagttctgctatgtggcgcggtattatcccgtattgacgccgggcaagagcaactcggtcgccgcatacactattctcagaatgacttggttgagtactcaccagtcacagaaaagcatcttacggatggcatgacagtaagagaattatgcagtgctgccataaccatgagtgataacactgcggccaacttacttctgacaacgatcggaggaccgaaggagctaaccgcttttttgcacaacatgggggatcatgtaactcgccttgatcgttgggaaccggagctgaatgaagccataccaaacgacgagcgtgacaccacgatgcctgtagcaatggcaacaacgttgcgcaaactattaactggcgaactacttactctagcttcccggcaacaattaatagactggatggaggcggataaagttgcaggaccacttctgcgctcggcccttccggctggctggtttattgctgataaatctggagccggtgagcgtgggtctcgcggtatcattgcagcactggggccagatggtaagccctcccgtatcgtagttatctacacgacggggagtcaggcaactatggatgaacgaaatagacagatcgctgagataggtgcctcactgattaagcattggtaactgtcagaccaagtttactcatatatactttagattgatttaaaacttcatttttaatttaaaaggatctaggtgaagatcctttttgataatctcatgaccaaaatcccttaacgtgagttttcgttccactgagcgtcagaccccgtagaaaagatcaaaggatcttcttgagatcctttttttctgcgcgtaatctgctgcttgcaaacaaaaaaaccaccgctaccagcggtggtttgtttgccggatcaagagctaccaactctttttccgaaggtaactggcttcagcagagcgcagataccaaatactgttcttctagtgtagccgtagttaggccaccacttcaagaactctgtagcaccgcctacatacctcgctctgctaatcctgttaccagtggctgctgccagtggcgataagtcgtgtcttaccgggttggactcaagacgatagttaccggataaggcgcagcggtcgggctgaacggggggttcgtgcacacagcccagcttggagcgaacgacctacaccgaactgagatacctacagcgtgagctatgagaaagcgccacgcttcccgaagggagaaaggcggacaggtatccggtaagcggcagggtcggaacaggagagcgcacgagggagcttccagggggaaacgcctggtatctttatagtcctgtcgggtttcgccacctctgacttgagcgtcgatttttgtgatgctcgtcaggggggcggagcctatggaaaaacgccagcaacgcggcctttttacggttcctggccttttgctggccttttgctcacatgttctttcctgcgttatcccctgattctgtggataaccgtattaccgcctttgagtgagctgataccgctcgccgcagccgaacgaccgagcgcagcgagtcagtgagcgaggaagcggaagagcgcccaatacgcaaaccgcctctccccgcgcgttggccgattcattaatgcagctggcacgacaggtttcccgactggaaagcgggcagtgagcgcaacgcaattaatgtgagttagctcactcattaggcaccccaggctttacactttatgcttccggctcgtatgttgtgtggaattgtgagcggataa

SEQ ID NO: 82 - DNA, 5487 bp, Artificial Sequence
  Description of Artificial Sequence: Synthetic polynucleotide
caatttcacacaggaaacagctatgaccatgattacgccagatttaattaaggccttaattaggctgcgcgctcgctcgctcactgaggccgcccgggcaaagcccgggcgtcgggcgacctttggtcgcccggcctcagtgagcgagcgagcgcgcagagagggagtgtagccatgctctaggaagatcaattcaattcacgcgtactatagctagagctcccaggctcaagtgatcctcccgcctcagcctcctgagtagctgagatcacaggcatgcactaccacactcggctcacatttgacatcctctaaagcatatataaaatgtgaagaaaactttcacaatttgcatccctttgtaatatgtaacagaaataaaattctcttttaaaatctatcaacaataggcaaggcacggtggctcacgcctgtcgtctcagcactttgtgaggcccaggcgggcagatcgtttgagcctagaagttcaagaccaccctgggcaacatagcgaaaccccctttctacaaaaaatacaaaaactagctgggtgtggtggtgcacacctgtagtcccagctacttggaaggctgaaatgggaagactgcttgagcccgggagggagaagttgcagtaagccaggaccacaccactgcactccagcctgggcaacagagtgagactctgtctcaaacaaacaaataaatgaggcgggtggatcacgaggtcagtagatcgagaccatcctggctaacacggtgaaacccgtctctactaaaaaaaaaaaaaaatacaaaaaattagccaggcatggtggcgggcgcctgtagtcccagttactcgggaggctgaggcaggagaatggcgtgaaaccgggaggcagagcttgcagtgagccgagatcgcaccactgccctccagcctgggcgacagagcgagactccgtctcaatcaatcaatcaatcaataaaatctattaacaatatttattgtgcacttaacaggaacatgccctgtccaaaaaaaactttacagggcttaactcattttatccttaccacaatcctatgaagtaggaacttttataaaacgcattttataaacaaggcacagagaggttaattaacttgccctctggtcacacagctaggaagtgggcagagtacagatttacacaaggcatccgtctcctggccccacatacccaactgctgtaaacccataccggcggccaagcagcctcaatttgtgcatgcacccacttcccagcaagacagcagctcccaagttcctcctgtttagaattttagaagcggcgggccaccaggctgcagtctcccttgggtcaggggtcctggttgcactccgtgctttgcacaaagcaggctctccatttttgttaaatgcacgaatagtgctaagctgggaagttcttcctgaggtctaacctctagctgctcccccacagaagagtgcctgcggccagtggccaccaggggtcgccgcagcacccagcgctggagggcggagcgggcggcagacccggagcagcaagtggactctctcgagaagcttgaactgaaaaaccagaaagttaactggtaagtttagtctttttgtcttttatttcaggtcccggatccggtggtggtgcaaatcaaagaactgctcctcagtggatgttgcctttacttctaggcctgtacggaagtgttacttctgctctaaaagctgcggaattgtacccgcggccgatccaccggtatgtggactctcgggcgacgcgccgtagccggtctcctggcttccccaagccctgcacaggcacagaccctcacacgggtcccacggccagctgaattggccccactctgcggtcgccggggcctgcgaaccgatatagacgcaacgtgcactccccgacgagcaagttccaaccagagagggctcaaccagatttggaacgtcaagaagcagagtgtctatttgatgaatctgagaaaatccgggacccttgggcaccccggatctcttgatgaaactacctatgaaaggctggccgaggagacgctggactctctggcagagttcttcgaggatctggcagacaagccatacacgtttgaggactatgatgtctcttttggatctggcgtcctgacggttaaactgggaggggatctcggaacctacgttatcaacaaacagactcccaataagcagatctggttgtctagtccatccagtggtcctaaacgctatgactggacgggcaagaactgggtgtactcccacgacggagttagccttcatgaactgctggccgcagagctgactaaagctcttaagactaaactggatctctctagcctggcctactccgggaaagatgcctagctcgaggacggggtgaactacgcctgaggatccgatctttttccctctgccaaaaattatggggacatcatgaagccccttgagcatctgacttctggctaataaaggaaatttattttcattgcaatagtgtgttggaattttttgtgtctctcactcggcctaggtagataagtagcatggcgggttaatcattaactacaaggaacccctagtgatggagttggccactccctctctgcgcgctcgctcgctcactgaggccgggcgaccaaaggtcgcccgacgcccgggctttgcccgggcggcctcagtgagcgagcgagcgcgcagccttaattaacctaattcactggccgtcgttttacaacgtcgtgactgggaaaaccctggcgttacccaacttaatcgccttgcagcacatccccctttcgccagctggcgtaatagcgaagaggcccgcaccgatcgcccttcccaacagttgcgcagcctgaatggcgaatgggacgcgccctgtagcggcgcattaagcgcggcgggtgtggtggttacgcgcagcgtgaccgctacacttgccagcgccctagcgcccgctcctttcgctttcttcccttcctttctcgccacgttcgccggctttccccgtcaagctctaaatcgggggctccctttagggttccgatttagtgctttacggcacctcgaccccaaaaaacttgattagggtgatggttcacgtagtgggccatcgccctgatagacggtttttcgccctttgacgttggagtccacgttctttaatagtggactcttgttccaaactggaacaacactcaaccctatctcggtctattcttttgatttataagggattttgccgatttcggcctattggttaaaaaatgagctgatttaacaaaaatttaacgcgaattttaacaaaatattaacgcttacaatttaggtggcacttttcggggaaatgtgcgcggaacccctatttgtttatttttctaaatacattcaaatatgtatccgctcatgagacaataaccctgataaatgcttcaataatattgaaaaaggaagagtatgagtattcaacatttccgtgtcgcccttattcccttttttgcggcattttgccttcctgtttttgctcacccagaaacgctggtgaaagtaaaagatgctgaagatcagttgggtgcacgagtgggttacatcgaactggatctcaacagcggtaagatccttgagagttttcgccccgaagaacgttttccaatgatgagcacttttaaagttctgctatgtggcgcggtattatcccgtattgacgccgggcaagagcaactcggtcgccgcatacactattctcagaatgacttggttgagtactcaccagtcacagaaaagcatcttacggatggcatgacagtaagagaattatgcagtgctgccataaccatgagtgataacactgcggccaacttacttctgacaacgatcggaggaccgaaggagctaaccgcttttttgcacaacatgggggatcatgtaactcgccttgatcgttgggaaccggagctgaatgaagccataccaaacgacgagcgtgacaccacgatgcctgtagcaatggcaacaacgttgcgcaaactattaactggcgaactacttactctagcttcccggcaacaattaatagactggatggaggcggataaagttgcaggaccacttctgcgctcggcccttccggctggctggtttattgctgataaatctggagccggtgagcgtgggtctcgcggtatcattgcagcactggggccagatggtaagccctcccgtatcgtagttatctacacgacggggagtcaggcaactatggatgaacgaaatagacagatcgctgagataggtgcctcactgattaagcattggtaactgtcagaccaagtttactcatatatactttagattgatttaaaacttcatttttaatttaaaaggatctaggtgaagatcctttttgataatctcatgaccaaaatcccttaacgtgagttttcgttccactgagcgtcagaccccgtagaaaagatcaaaggatcttcttgagatcctttttttctgcgcgtaatctgctgcttgcaaacaaaaaaaccaccgctaccagcggtggtttgtttgccggatcaagagctaccaactctttttccgaaggtaactggcttcagcagagcgcagataccaaatactgttcttctagtgtagccgtagttaggccaccacttcaagaactctgtagcaccgcctacatacctcgctctgctaatcctgttaccagtggctgctgccagtggcgataagtcgtgtcttaccgggttggactcaagacgatagttaccggataaggcgcagcggtcgggctgaacggggggttcgtgcacacagcccagcttggagcgaacgacctacaccgaactgagatacctacagcgtgagctatgagaaagcgccacgcttcccgaagggagaaaggcggacaggtatccggtaagcggcagggtcggaacaggagagcgcacgagggagcttccagggggaaacgcctggtatctttatagtcctgtcgggtttcgccacctctgacttgagcgtcgatttttgtgatgctcgtcaggggggcggagcctatggaaaaacgccagcaacgcggcctttttacggttcctggccttttgctggccttttgctcacatgttctttcctgcgttatcccctgattctgtggataaccgtattaccgcctttgagtgagctgataccgctcgccgcagccgaacgaccgagcgcagcgagtcagtgagcgaggaagcggaagagcgcccaatacgcaaaccgcctctccccgcgcgttggccgattcattaatgcagctggcacgacaggtttcccgactggaaagcgggcagtgagcgcaacgcaattaatgtgagttagctcactcattaggcaccccaggctttacactttatgcttccggctcgtatgttgtgtggaattgtgagcggataa

SEQ ID NO: 83 - DNA, 5487 bp, Artificial Sequence
  Description of Artificial Sequence: Synthetic polynucleotide
caatttcacacaggaaacagctatgaccatgattacgccagatttaattaaggccttaattaggctgcgcgctcgctcgctcactgaggccgcccgggcaaagcccgggcgtcgggcgacctttggtcgcccggcctcagtgagcgagcgagcgcgcagagagggagtgtagccatgctctaggaagatcaattcaattcacgcgtactatagctagagctcccaggctcaagtgatcctcccgcctcagcctcctgagtagctgagatcacaggcatgcactaccacactcggctcacatttgacatcctctaaagcatatataaaatgtgaagaaaactttcacaatttgcatccctttgtaatatgtaacagaaataaaattctcttttaaaatctatcaacaataggcaaggcacggtggctcacgcctgtcgtctcagcactttgtgaggcccaggcgggcagatcgtttgagcctagaagttcaagaccaccctgggcaacatagcgaaaccccctttctacaaaaaatacaaaaactagctgggtgtggtggtgcacacctgtagtcccagctacttggaaggctgaaatgggaagactgcttgagcccgggagggagaagttgcagtaagccaggaccacaccactgcactccagcctgggcaacagagtgagactctgtctcaaacaaacaaataaatgaggcgggtggatcacgaggtcagtagatcgagaccatcctggctaacacggtgaaacccgtctctactaaaaaaaaaaaaaaatacaaaaaattagccaggcatggtggcgggcgcctgtagtcccagttactcgggaggctgaggcaggagaatggcgtgaaaccgggaggcagagcttgcagtgagccgagatcgcaccactgccctccagcctgggcgacagagcgagactccgtctcaatcaatcaatcaatcaataaaatctattaacaatatttattgtgcacttaacaggaacatgccctgtccaaaaaaaactttacagggcttaactcattttatccttaccacaatcctatgaagtaggaacttttataaaacgcattttataaacaaggcacagagaggttaattaacttgccctctggtcacacagctaggaagtgggcagagtacagatttacacaaggcatccgtctcctggccccacatacccaactgctgtaaacccataccggcggccaagcagcctcaatttgtgcatgcacccacttcccagcaagacagcagctcccaagttcctcctgtttagaattttagaagcggcgggccaccaggctgcagtctcccttgggtcaggggtcctggttgcactccgtgctttgcacaaagcaggctctccatttttgttaaatgcacgaatagtgctaagctgggaagttcttcctgaggtctaacctctagctgctcccccacagaagagtgcctgcggccagtggccaccaggggtcgccgcagcacccagcgctggagggcggagcgggcggcagacccggagcagcaagtggactctctcgagaagcttgaactgaaaaaccagaaagttaactggtaagtttagtctttttgtcttttatttcaggtcccggatccggtggtggtgcaaatcaaagaactgctcctcagtggatgttgcctttacttctaggcctgtacggaagtgttacttctgctctaaaagctgcggaattgtacccgcggccgatccaccggtatgtggactctggggcgacgcgccgtggccgggctcctggcatccccatcccctgcgcaggcgcaaaccctcacacgggttccacggccagctgaactggccccactgtgcggccggcggggcctgagaacagatattgacgcaacgtgcactcccagaagagccagcagcaaccagagggggttgaatcagatctggaacgtcaagaagcagtcagtgtacctgatgaatctccgaaaaagcgggacccttggtcaccccggatctctcgatgaaaccacatatgaacggctggccgaggaaacgctggactccctggccgagttcttcgaggacctggcagacaagccgtacaccttcgaagactatgatgtttcattcggaagtggcgtgctgacggtcaaactgggaggcgatctgggaacctacgttataaacaaacagactcccaataaacagatctggttgtctagtccatccagcggtcctaaacgctatgactggacgggcaagaactgggtctactcccacgacggagttagccttcacgaactgttggccgcagagctgacaaaggcgcttaagacgaaactggatctctctagcctggcctactccggcaaagatgcctagctcgaggacggggtgaactacgcctgaggatccgatctttttccctctgccaaaaattatggggacatcatgaagccccttgagcatctgacttctggctaataaaggaaatttattttcattgcaatagtgtgttggaattttttgtgtctctcactcggcctaggtagataagtagcatggcgggttaatcattaactacaaggaacccctagtgatggagttggccactccctctctgcgcgctcgctcgctcactgaggccgggcgaccaaaggtcgcccgacgcccgggctttgcccgggcggcctcagtgagcgagcgagcgcgcagccttaattaacctaattcactggccgtcgttttacaacgtcgtgactgggaaaaccctggcgttacccaacttaatcgccttgcagcacatccccctttcgccagctggcgtaatagcgaagaggcccgcaccgatcgcccttcccaacagttgcgcagcctgaatggcgaatgggacgcgccctgtagcggcgcattaagcgcggcgggtgtggtggttacgcgcagcgtgaccgctacacttgccagcgccctagcgcccgctcctttcgctttcttcccttcctttctcgccacgttcgccggctttccccgtcaagctctaaatcgggggctccctttagggttccgatttagtgctttacggcacctcgaccccaaaaaacttgattagggtgatggttcacgtagtgggccatcgccctgatagacggtttttcgccctttgacgttggagtccacgttctttaatagtggactcttgttccaaactggaacaacactcaaccctatctcggtctattcttttgatttataagggattttgccgatttcggcctattggttaaaaaatgagctgatttaacaaaaatttaacgcgaattttaacaaaatattaacgcttacaatttaggtggcacttttcggggaaatgtgcgcggaacccctatttgtttatttttctaaatacattcaaatatgtatccgctcatgagacaataaccctgataaatgcttcaataatattgaaaaaggaagagtatgagtattcaacatttccgtgtcgcccttattcccttttttgcggcattttgccttcctgtttttgctcacccagaaacgctggtgaaagtaaaagatgctgaagatcagttgggtgcacgagtgggttacatcgaactggatctcaacagcggtaagatccttgagagttttcgccccgaagaacgttttccaatgatgagcacttttaaagttctgctatgtggcgcggtattatcccgtattgacgccgggcaagagcaactcggtcgccgcatacactattctcagaatgacttggttgagtactcaccagtcacagaaaagcatcttacggatggcatgacagtaagagaattatgcagtgctgccataaccatgagtgataacactgcggccaacttacttctgacaacgatcggaggaccgaaggagctaaccgcttttttgcacaacatgggggatcatgtaactcgccttgatcgttgggaaccggagctgaatgaagccataccaaacgacgagcgtgacaccacgatgcctgtagcaatggcaacaacgttgcgcaaactattaactggcgaactacttactctagcttcccggcaacaattaatagactggatggaggcggataaagttgcaggaccacttctgcgctcggcccttccggctggctggtttattgctgataaatctggagccggtgagcgtgggtctcgcggtatcattgcagcactggggccagatggtaagccctcccgtatcgtagttatctacacgacggggagtcaggcaactatggatgaacgaaatagacagatcgctgagataggtgcctcactgattaagcattggtaactgtcagaccaagtttactcatatatactttagattgatttaaaacttcatttttaatttaaaaggatctaggtgaagatcctttttgataatctcatgaccaaaatcccttaacgtgagttttcgttccactgagcgtcagaccccgtagaaaagatcaaaggatcttcttgagatcctttttttctgcgcgtaatctgctgcttgcaaacaaaaaaaccaccgctaccagcggtggtttgtttgccggatcaagagctaccaactctttttccgaaggtaactggcttcagcagagcgcagataccaaatactgttcttctagtgtagccgtagttaggccaccacttcaagaactctgtagcaccgcctacatacctcgctctgctaatcctgttaccagtggctgctgccagtggcgataagtcgtgtcttaccgggttggactcaagacgatagttaccggataaggcgcagcggtcgggctgaacggggggttcgtgcacacagcccagcttggagcgaacgacctacaccgaactgagatacctacagcgtgagctatgagaaagcgccacgcttcccgaagggagaaaggcggacaggtatccggtaagcggcagggtcggaacaggagagcgcacgagggagcttccagggggaaacgcctggtatctttatagtcctgtcgggtttcgccacctctgacttgagcgtcgatttttgtgatgctcgtcaggggggcggagcctatggaaaaacgccagcaacgcggcctttttacggttcctggccttttgctggccttttgctcacatgttctttcctgcgttatcccctgattctgtggataaccgtattaccgcctttgagtgagctgataccgctcgccgcagccgaacgaccgagcgcagcgagtcagtgagcgaggaagcggaagagcgcccaatacgcaaaccgcctctccccgcgcgttggccgattcattaatgcagctggcacgacaggtttcccgactggaaagcgggcagtgagcgcaacgcaattaatgtgagttagctcactcattaggcaccccaggctttacactttatgcttccggctcgtatgttgtgtggaattgtgagcggataa

SEQ ID NO: 84 - DNA, 6391 bp, Artificial Sequence
  Description of Artificial Sequence: Synthetic polynucleotide
caatttcacacaggaaacagctatgaccatgattacgccagatttaattaaggccttaattaggctgcgcgctcgctcgctcactgaggccgcccgggcaaagcccgggcgtcgggcgacctttggtcgcccggcctcagtgagcgagcgagcgcgcagagagggagtgtagccatgctctaggaagatcaattcaattcacgcgtcccacctccctctctgtgctgggactcacagagggagacctcaggaggcagtctgtccatcacatgtccaaatgcagagcataccctgggctgggcgcagtggcgcacaactgtaattccagcactttgggaggctgatgtggaaggatcacttgagcccagaagttctagaccagcctgggcaacatggcaagaccctatctctacaaaaaaagttaaaaaatcagccacgtgtggtgacacacacctgtagtcccagctattcaggaggctgaggtgaggggatcacttaaggctgggaggttgaggctgcagtgagtcgtggttgcgccactgcactccagcctgggcaacagtgagaccctgtctcaaaagacaaaaaaaaaaaaaaaaaaaaaaagaacatatcctggtgtggagtaggggacgctgctctgacagaggctcgggggcctgagctggctctgtgagctggggaggaggcagacagccaggccttgtctgcaagcagacctggcagcattgggctggccgccccccagggcctcctcttcatgcccagtgaatgactcaccttggcacagacacaatgttcggggtgggcacagtgcctgcttcccgccgcaccccagcccccctcaaatgccttccgagaagcccattgagcagggggcttgcattgcaccccagcctgacagcctggcatcttgggataaaagcagcacagccccctaggggctgcccttgctgtgtggcgccaccggcggtggagaacaaggctctattcagcctgtgcccaggaaaggggatcaggggatgcccaggcatggacagtgggtggcagggggggagaggagggctgtctgcttcccagaagtccaaggacacaaatgggtgaggggactgggcagggttctgaccctgtgggaccagagtggagggcgtagatggacctgaagtctccagggacaacagggcccaggtctcaggctcctagttgggcccagtggctccagcgtttccaaacccatccatccccagaggttcttcccatctctccaggctgatgtgtgggaactcgaggaaataaatctccagtgggagacggaggggtggccagggaaacggggcgctgcaggaataaagacgagccagcacagccagctcatgtgtaacggctttgtggagctgtcaaggcctggtctctgggagagaggcacagggaggccagacaaggaaggggtgacctggagggacagatccaggggctaaagtcctgataaggcaagagagtgccggccccctcttgccctatcaggacctccactgccacatagaggccatgattgacccttagacaaagggctggtgtccaatcccagcccccagccccagaactccagggaatgaatgggcagagagcaggaatgtgggacatctgtgttcaagggaaggactccaggagtctgctgggaatgaggcctagtaggaaatgaggtggcccttgagggtacagaacaggttcattcttcgccaaattcccagcaccttgcaggcacttacagctgagtgagataatgcctgggttatgaaatcaaaaagttggaaagcaggtcagaggtcatctggtacagcccttccttccctttttttttttttttttttgtgagacaaggtctctctctgttgcccaggctggagtggcgcaaacacagctcactgcagcctcaacctactgggctcaagcaatcctccagcctcagcctcccaaagtgctgggattacaagcatgagccaccccactcagccctttccttcctttttaattgatgcataataattgtaagtattcatcatggtccaaccaaccctttcttgacccaccttcctagagagagggtcctcttgcttcagcggtcagggccccagacccatggtctggctccaggtaccacctgcctcatgcaggagttggcgtgcccaggaagctctgcctctgggcacagtgacctcagtggggtgaggggagctctccccatagctgggctgcggcccaaccccaccccctcaggctatgccagggggtgttgccaggggcacccgggcatcgccagtctagcccactccttcataaagccctcgcatcccaggagcgagcagagccagagcaggttggagaggagacgcatcacctccgctgctcgccgggatcctcgggagcaagcttgaactgaaaaaccagaaagttaactggtaagtttagtctttttgtcttttatttcaggtcccggatccggtggtggtgcaaatcaaagaactgctcctcagtggatgttgcctttacttctaggcctgtacggaagtgttacttctgctctaaaagctgcggaattgtacccgcggccgatccaccggtatgtggactctcgggcgccgcgcagtagccggcctcctggcgtcacccagcccagcccaggcccagaccctcacccgggtcccgcggccggcagagttggccccactctgcggccgccgtggcctgcgcaccgacatcgatgcgacctgcacgccccgccgcgcaagttcgaaccaacgtggcctcaaccagatttggaatgtcaaaaagcagagtgtctatttgatgaatttgaggaaatctggaactttgggccacccaggctctctagatgagaccacctatgaaagactagcagaggaaacgctggactctttagcagagttttttgaagaccttgcagacaagccatacacgtttgaggactatgatgtctcctttgggagtggtgtcttaactgtcaaactgggtggagatctaggaacctatgtgatcaacaagcagacgccaaacaagcaaatctggctatcttctccatccagtggacctaagcgttatgactggactgggaaaaactgggtgtactcccacgacggcgtgtccctccatgagctgctggccgcagagctcactaaagccttaaaaaccaaactggacttgtcttccttggcctattccggaaaagatgcttgagcggccctagcgtttaaacgggccctctagagtcgacccgggcggcctcgaggacggggtgaactacgcctgaggatccgatctttttccctctgccaaaaattatggggacatcatgaagccccttgagcatctgacttctggctaataaaggaaatttattttcattgcaatagtgtgttggaattttttgtgtctctcactcggcctaggtagataagtagcatggcgggttaatcattaactacaaggaacccctagtgatggagttggccactccctctctgcgcgctcgctcgctcactgaggccgggcgaccaaaggtcgcccgacgcccgggctttgcccgggcggcctcagtgagcgagcgagcgcgcagccttaattaacctaattcactggccgtcgttttacaacgtcgtgactgggaaaaccctggcgttacccaacttaatcgccttgcagcacatccccctttcgccagctggcgtaatagcgaagaggcccgcaccgatcgcccttcccaacagttgcgcagcctgaatggcgaatgggacgcgccctgtagcggcgcattaagcgcggcgggtgtggtggttacgcgcagcgtgaccgctacacttgccagcgccctagcgcccgctcctttcgctttcttcccttcctttctcgccacgttcgccggctttccccgtcaagctctaaatcgggggctccctttagggttccgatttagtgctttacggcacctcgaccccaaaaaacttgattagggtgatggttcacgtagtgggccatcgccctgatagacggtttttcgccctttgacgttggagtccacgttctttaatagtggactcttgttccaaactggaacaacactcaaccctatctcggtctattcttttgatttataagggattttgccgatttcggcctattggttaaaaaatgagctgatttaacaaaaatttaacgcgaattttaacaaaatattaacgcttacaatttaggtggcacttttcggggaaatgtgcgcggaacccctatttgtttatttttctaaatacattcaaatatgtatccgctcatgagacaataaccctgataaatgcttcaataatattgaaaaaggaagagtatgagtattcaacatttccgtgtcgcccttattcccttttttgcggcattttgccttcctgtttttgctcacccagaaacgctggtgaaagtaaaagatgctgaagatcagttgggtgcacgagtgggttacatcgaactggatctcaacagcggtaagatccttgagagttttcgccccgaagaacgttttccaatgatgagcacttttaaagttctgctatgtggcgcggtattatcccgtattgacgccgggcaagagcaactcggtcgccgcatacactattctcagaatgacttggttgagtactcaccagtcacagaaaagcatcttacggatggcatgacagtaagagaattatgcagtgctgccataaccatgagtgataacactgcggccaacttacttctgacaacgatcggaggaccgaaggagctaaccgcttttttgcacaacatgggggatcatgtaactcgccttgatcgttgggaaccggagctgaatgaagccataccaaacgacgagcgtgacaccacgatgcctgtagcaatggcaacaacgttgcgcaaactattaactggcgaactacttactctagcttcccggcaacaattaatagactggatggaggcggataaagttgcaggaccacttctgcgctcggcccttccggctggctggtttattgctgataaatctggagccggtgagcgtgggtctcgcggtatcattgcagcactggggccagatggtaagccctcccgtatcgtagttatctacacgacggggagtcaggcaactatggatgaacgaaatagacagatcgctgagataggtgcctcactgattaagcattggtaactgtcagaccaagtttactcatatatactttagattgatttaaaacttcatttttaatttaaaaggatctaggtgaagatcctttttgataatctcatgaccaaaatcccttaacgtgagttttcgttccactgagcgtcagaccccgtagaaaagatcaaaggatcttcttgagatcctttttttctgcgcgtaatctgctgcttgcaaacaaaaaaaccaccgctaccagcggtggtttgtttgccggatcaagagctaccaactctttttccgaaggtaactggcttcagcagagcgcagataccaaatactgttcttctagtgtagccgtagttaggccaccacttcaagaactctgtagcaccgcctacatacctcgctctgctaatcctgttaccagtggctgctgccagtggcgataagtcgtgtcttaccgggttggactcaagacgatagttaccggataaggcgcagcggtcgggctgaacggggggttcgtgcacacagcccagcttggagcgaacgacctacaccgaactgagatacctacagcgtgagctatgagaaagcgccacgcttcccgaagggagaaaggcggacaggtatccggtaagcggcagggtcggaacaggagagcgcacgagggagcttccagggggaaacgcctggtatctttatagtcctgtcgggtttcgccacctctgacttgagcgtcgatttttgtgatgctcgtcaggggggcggagcctatggaaaaacgccagcaacgcggcctttttacggttcctggccttttgctggccttttgctcacatgttctttcctgcgttatcccctgattctgtggataaccgtattaccgcctttgagtgagctgataccgctcgccgcagccgaacgaccgagcgcagcgagtcagtgagcgaggaagcggaagagcgcccaatacgcaaaccgcctctccccgcgcgttggccgattcattaatgcagctggcacgacaggtttcccgactggaaagcgggcagtgagcgcaacgcaattaatgtgagttagctcactcattaggcaccccaggctttacactttatgcttccggctcgtatgttgtgtggaattgtgagcggataa

SEQ ID NO: 85 - DNA, 4699 bp, Artificial Sequence
  Description of Artificial Sequence: Synthetic polynucleotide
caatttcacacaggaaacagctatgaccatgattacgccagatttaattaaggccttaattaggctgcgcgctcgctcgctcactgaggccgcccgggcaaagcccgggcgtcgggcgacctttggtcgcccggcctcagtgagcgagcgagcgcgcagagagggagtgtagccatgctctaggaagatcaattcaattcacgcgtactatagtccacggggttggggttgcgccttttccaaggcagccctgggtttgcgcagggacgcggctgctctgggcgtggttccgggaaacgcagcggcgccgaccctgggtctcgcacattcttcacgtccgttcgcagcgtcacccggatcttcgccgctacccttgtgggccccccggcgacgcttcctcgtccgcccctaagtcgggaaggttccttgcggttcgcggcgtgccggacgtgacaaacggaagccgcacgtctcactagtaccctcgcagacggacagcgccagggagcaatggcagcgcgccgaccgcgatgggctgtggccaatagcggctgctcagcagggcgcgccgagagcagcggccgggaaggggcggtgcgggaggcggggtgtggggcggtagtgtgggccctgttcctgcccgcgcggtgttccgcattctgcaagcctccggagcgcacgtcggcagtcggctccctcgttgaccgaatcaccgacctctctccccacgggagcaagcttgaactgaaaaaccagaaagttaactggtaagtttagtctttttgtcttttatttcaggtcccggatccggtggtggtgcaaatcaaagaactgctcctcagtggatgttgcctttacttctaggcctgtacggaagtgttacttctgctctaaaagctgcggaattgtacccgcggccgatccaccggtatgtggactctcgggcgccgcgcagtagccggcctcctggcgtcacccagcccagcccaggcccagaccctcacccgggtcccgcggccggcagagttggccccactctgcggccgccgtggcctgcgcaccgacatcgatgcgacctgcacgccccgccgcgcaagttcgaaccaacgtggcctcaaccagatttggaatgtcaaaaagcagagtgtctatttgatgaatttgaggaaatctggaactttgggccacccaggctctctagatgagaccacctatgaaagactagcagaggaaacgctggactctttagcagagttttttgaagaccttgcagacaagccatacacgtttgaggactatgatgtctcctttgggagtggtgtcttaactgtcaaactgggtggagatctaggaacctatgtgatcaacaagcagacgccaaacaagcaaatctggctatcttctccatccagtggacctaagcgttatgactggactgggaaaaactgggtgtactcccacgacggcgtgtccctccatgagctgctggccgcagagctcactaaagccttaaaaaccaaactggacttgtcttccttggcctattccggaaaagatgcttgagcggccctagcgtttaaacgggccctctagagtcgacccgggcggcctcgaggacggggtgaactacgcctgaggatccgatctttttccctctgccaaaaattatggggacatcatgaagccccttgagcatctgacttctggctaataaaggaaatttattttcattgcaatagtgtgttggaattttttgtgtctctcactcggcctaggtagataagtagcatggcgggttaatcattaactacaaggaacccctagtgatggagttggccactccctctctgcgcgctcgctcgctcactgaggccgggcgaccaaaggtcgcccgacgcccgggctttgcccgggcggcctcagtgagcgagcgagcgcgcagccttaattaacctaattcactggccgtcgttttacaacgtcgtgactgggaaaaccctggcgttacccaacttaatcgccttgcagcacatccccctttcgccagctggcgtaatagcgaagaggcccgcaccgatcgcccttcccaacagttgcgcagcctgaatggcgaatgggacgcgccctgtagcggcgcattaagcgcggcgggtgtggtggttacgcgcagcgtgaccgctacacttgccagcgccctagcgcccgctcctttcgctttcttcccttcctttctcgccacgttcgccggctttccccgtcaagctctaaatcgggggctccctttagggttccgatttagtgctttacggcacctcgaccccaaaaaacttgattagggtgatggttcacgtagtgggccatcgccctgatagacggtttttcgccctttgacgttggagtccacgttctttaatagtggactcttgttccaaactggaacaacactcaaccctatctcggtctattcttttgatttataagggattttgccgatttcggcctattggttaaaaaatgagctgatttaacaaaaatttaacgcgaattttaacaaaatattaacgcttacaatttaggtggcacttttcggggaaatgtgcgcggaacccctatttgtttatttttctaaatacattcaaatatgtatccgctcatgagacaataaccctgataaatgcttcaataatattgaaaaaggaagagtatgagtattcaacatttccgtgtcgcccttattcccttttttgcggcattttgccttcctgtttttgctcacccagaaacgctggtgaaagtaaaagatgctgaagatcagttgggtgcacgagtgggttacatcgaactggatctcaacagcggtaagatccttgagagttttcgccccgaagaacgttttccaatgatgagcacttttaaagttctgctatgtggcgcggtattatcccgtattgacgccgggcaagagcaactcggtcgccgcatacactattctcagaatgacttggttgagtactcaccagtcacagaaaagcatcttacggatggcatgacagtaagagaattatgcagtgctgccataaccatgagtgataacactgcggccaacttacttctgacaacgatcggaggaccgaaggagctaaccgcttttttgcacaacatgggggatcatgtaactcgccttgatcgttgggaaccggagctgaatgaagccataccaaacgacgagcgtgacaccacgatgcctgtagcaatggcaacaacgttgcgcaaactattaactggcgaactacttactctagcttcccggcaacaattaatagactggatggaggcggataaagttgcaggaccacttctgcgctcggcccttccggctggctggtttattgctgataaatctggagccggtgagcgtgggtctcgcggtatcattgcagcactggggccagatggtaagccctcccgtatcgtagttatctacacgacggggagtcaggcaactatggatgaacgaaatagacagatcgctgagataggtgcctcactgattaagcattggtaactgtcagaccaagtttactcatatatactttagattgatttaaaacttcatttttaatttaaaaggatctaggtgaagatcctttttgataatctcatgaccaaaatcccttaacgtgagttttcgttccactgagcgtcagaccccgtagaaaagatcaaaggatcttcttgagatcctttttttctgcgcgtaatctgctgcttgcaaacaaaaaaaccaccgctaccagcggtggtttgtttgccggatcaagagctaccaactctttttccgaaggtaactggcttcagcagagcgcagataccaaatactgttcttctagtgtagccgtagttaggccaccacttcaagaactctgtagcaccgcctacatacctcgctctgctaatcctgttaccagtggctgctgccagtggcgataagtcgtgtcttaccgggttggactcaagacgatagttaccggataaggcgcagcggtcgggctgaacggggggttcgtgcacacagcccagcttggagcgaacgacctacaccgaactgagatacctacagcgtgagctatgagaaagcgccacgcttcccgaagggagaaaggcggacaggtatccggtaagcggcagggtcggaacaggagagcgcacgagggagcttccagggggaaacgcctggtatctttatagtcctgtcgggtttcgccacctctgacttgagcgtcgatttttgtgatgctcgtcaggggggcggagcctatggaaaaacgccagcaacgcggcctttttacggttcctggccttttgctggccttttgctcacatgttctttcctgcgttatcccctgattctgtggataaccgtattaccgcctttgagtgagctgataccgctcgccgcagccgaacgaccgagcgcagcgagtcagtgagcgaggaagcggaagagcgcccaatacgcaaaccgcctctccccgcgcgttggccgattcattaatgcagctggcacgacaggtttcccgactggaaagcgggcagtgagcgcaacgcaattaatgtgagttagctcactcattaggcaccccaggctttacactttatgcttccggctcgtatgttgtgtggaattgtgagcggataa

SEQ ID NO: 86 - DNA, 4653 bp, Artificial Sequence
  Description of Artificial Sequence: Synthetic polynucleotide
caatttcacacaggaaacagctatgaccatgattacgccagatttaattaaggccttaattaggctgcgcgctcgctcgctcactgaggccgcccgggcaaagcccgggcgtcgggcgacctttggtcgcccggcctcagtgagcgagcgagcgcgcagagagggagtgtagccatgctctaggaagatcaattcaattcacgcgtactatagtccacggggttggggttgcgccttttccaaggcagccctgggtttgcgcagggacgcggctgctctgggcgtggttccgggaaacgcagcggcgccgaccctgggtctcgcacattcttcacgtccgttcgcagcgtcacccggatcttcgccgctacccttgtgggccccccggcgacgcttcctcgtccgcccctaagtcgggaaggttccttgcggttcgcggcgtgccggacgtgacaaacggaagccgcacgtctcactagtaccctcgcagacggacagcgccagggagcaatggcagcgcgccgaccgcgatgggctgtggccaatagcggctgctcagcagggcgcgccgagagcagcggccgggaaggggcggtgcgggaggcggggtgtggggcggtagtgtgggccctgttcctgcccgcgcggtgttccgcattctgcaagcctccggagcgcacgtcggcagtcggctccctcgttgaccgaatcaccgacctctctccccacgggagcaagcttgaactgaaaaaccagaaagttaactggtaagtttagtctttttgtcttttatttcaggtcccggatccggtggtggtgcaaatcaaagaactgctcctcagtggatgttgcctttacttctaggcctgtacggaagtgttacttctgctctaaaagctgcggaattgtacccgcggccgatccaccggtatgtggacactcgggcgacgcgccgtggctgggctgcttgcttccccaagtcccgcacaggcgcaaaccctcacaagggtcccacggccagctgaattggccccgctgtgcggtcggaggggcctgcgaacagatatagacgcaacgtgcacccccagaagagcaagcagcaaccagagaggcctcaatcagatttggaacgtcaagaaacagagtgtctatctgatgaacctccgcaaatcagggacccttggtcatccgggatctcttgatgaaacgacctatgaacggctggctgaggagacgcttgactccctggcagagttcttcgaggatctggctgataagccatacacgttcgaggactatgatgtttcttttggttctggcgtcctgacggtgaaactcggaggggatctgggcacttacgttatcaacaaacagactcccaataaacagatttggttgtctagtcctagcagtggcccaaaacgctatgactggacgggcaagaactgggtgtactcccacgatggagttagcctgcacgaacttctggccgctgagcttactaaagcgctgaagactaagctggatctctccagcctcgcatacagcggcaaagacgcctagctcgaggacggggtgaactacgcctgaggatccgatctttttccctctgccaaaaattatggggacatcatgaagccccttgagcatctgacttctggctaataaaggaaatttattttcattgcaatagtgtgttggaattttttgtgtctctcactcggcctaggtagataagtagcatggcgggttaatcattaactacaaggaacccctagtgatggagttggccactccctctctgcgcgctcgctcgctcactgaggccgggcgaccaaaggtcgcccgacgcccgggctttgcccgggcggcctcagtgagcgagcgagcgcgcagccttaattaacctaattcactggccgtcgttttacaacgtcgtgactgggaaaaccctggcgttacccaacttaatcgccttgcagcacatccccctttcgccagctggcgtaatagcgaagaggcccgcaccgatcgcccttcccaacagttgcgcagcctgaatggcgaatgggacgcgccctgtagcggcgcattaagcgcggcgggtgtggtggttacgcgcagcgtgaccgctacacttgccagcgccctagcgcccgctcctttcgctttcttcccttcctttctcgccacgttcgccggctttccccgtcaagctctaaatcgggggctccctttagggttccgatttagtgctttacggcacctcgaccccaaaaaacttgattagggtgatggttcacgtagtgggccatcgccctgatagacggtttttcgccctttgacgttggagtccacgttctttaatagtggactcttgttccaaactggaacaacactcaaccctatctcggtctattcttttgatttataagggattttgccgatttcggcctattggttaaaaaatgagctgatttaacaaaaatttaacgcgaattttaacaaaatattaacgcttacaatttaggtggcacttttcggggaaatgtgcgcggaacccctatttgtttatttttctaaatacattcaaatatgtatccgctcatgagacaataaccctgataaatgcttcaataatattgaaaaaggaagagtatgagtattcaacatttccgtgtcgcccttattcccttttttgcggcattttgccttcctgtttttgctcacccagaaacgctggtgaaagtaaaagatgctgaagatcagttgggtgcacgagtgggttacatcgaactggatctcaacagcggtaagatccttgagagttttcgccccgaagaacgttttccaatgatgagcacttttaaagttctgctatgtggcgcggtattatcccgtattgacgccgggcaagagcaactcggtcgccgcatacactattctcagaatgacttggttgagtactcaccagtcacagaaaagcatcttacggatggcatgacagtaagagaattatgcagtgctgccataaccatgagtgataacactgcggccaacttacttctgacaacgatcggaggaccgaaggagctaaccgcttttttgcacaacatgggggatcatgtaactcgccttgatcgttgggaaccggagctgaatgaagccataccaaacgacgagcgtgacaccacgatgcctgtagcaatggcaacaacgttgcgcaaactattaactggcgaactacttactctagcttcccggcaacaattaatagactggatggaggcggataaagttgcaggaccacttctgcgctcggcccttccggctggctggtttattgctgataaatctggagccggtgagcgtgggtctcgcggtatcattgcagcactggggccagatggtaagccctcccgtatcgtagttatctacacgacggggagtcaggcaactatggatgaacgaaatagacagatcgctgagataggtgcctcactgattaagcattggtaactgtcagaccaagtttactcatatatactttagattgatttaaaacttcatttttaatttaaaaggatctaggtgaagatcctttttgataatctcatgaccaaaatcccttaacgtgagttttcgttccactgagcgtcagaccccgtagaaaagatcaaaggatcttcttgagatcctttttttctgcgcgtaatctgctgcttgcaaacaaaaaaaccaccgctaccagcggtggtttgtttgccggatcaagagctaccaactctttttccgaaggtaactggcttcagcagagcgcagataccaaatactgttcttctagtgtagccgtagttaggccaccacttcaagaactctgtagcaccgcctacatacctcgctctgctaatcctgttaccagtggctgctgccagtggcgataagtcgtgtcttaccgggttggactcaagacgatagttaccggataaggcgcagcggtcgggctgaacggggggttcgtgcacacagcccagcttggagcgaacgacctacaccgaactgagatacctacagcgtgagctatgagaaagcgccacgcttcccgaagggagaaaggcggacaggtatccggtaagcggcagggtcggaacaggagagcgcacgagggagcttccagggggaaacgcctggtatctttatagtcctgtcgggtttcgccacctctgacttgagcgtcgatttttgtgatgctcgtcaggggggcggagcctatggaaaaacgccagcaacgcggcctttttacggttcctggccttttgctggccttttgctcacatgttctttcctgcgttatcccctgattctgtggataaccgtattaccgcctttgagtgagctgataccgctcgccgcagccgaacgaccgagcgcagcgagtcagtgagcgaggaagcggaagagcgcccaatacgcaaaccgcctctccccgcgcgttggccgattcattaatgcagctggcacgacaggtttcccgactggaaagcgggcagtgagcgcaacgcaattaatgtgagttagctcactcattaggcaccccaggctttacactttatgcttccggctcgtatgttgtgtggaattgtgagcggataa

SEQ ID NO: 87 - DNA, 4653 bp, Artificial Sequence
  Description of Artificial Sequence: Synthetic polynucleotide
caatttcacacaggaaacagctatgaccatgattacgccagatttaattaaggccttaattaggctgcgcgctcgctcgctcactgaggccgcccgggcaaagcccgggcgtcgggcgacctttggtcgcccggcctcagtgagcgagcgagcgcgcagagagggagtgtagccatgctctaggaagatcaattcaattcacgcgtactatagtccacggggttggggttgcgccttttccaaggcagccctgggtttgcgcagggacgcggctgctctgggcgtggttccgggaaacgcagcggcgccgaccctgggtctcgcacattcttcacgtccgttcgcagcgtcacccggatcttcgccgctacccttgtgggccccccggcgacgcttcctcgtccgcccctaagtcgggaaggttccttgcggttcgcggcgtgccggacgtgacaaacggaagccgcacgtctcactagtaccctcgcagacggacagcgccagggagcaatggcagcgcgccgaccgcgatgggctgtggccaatagcggctgctcagcagggcgcgccgagagcagcggccgggaaggggcggtgcgggaggcggggtgtggggcggtagtgtgggccctgttcctgcccgcgcggtgttccgcattctgcaagcctccggagcgcacgtcggcagtcggctccctcgttgaccgaatcaccgacctctctccccacgggagcaagcttgaactgaaaaaccagaaagttaactggtaagtttagtctttttgtcttttatttcaggtcccggatccggtggtggtgcaaatcaaagaactgctcctcagtggatgttgcctttacttctaggcctgtacggaagtgttacttctgctctaaaagctgcggaattgtacccgcggccgatccaccggtatgtggactctgggtcgacgcgccgtagccggtctcttggcctccccatcccctgcgcaggcacagacccttacacgagttccacggcccgctgaactggcaccactctgcggacgccggggcctgagaaccgatattgacgctacgtgcactccccgacgagcctcttctaatcagagggggctcaaccagatctggaacgtgaagaagcagtcagtctacttgatgaatctgagaaagagcgggacccttgggcaccccgggtctctcgacgagactacatacgagaggctggccgaggagactttggactctctcgccgaattcttcgaggatttggcagacaagccgtacacctttgaagactacgatgtctcattcggatcaggggtgctgacggttaaactggggggcgatctcggaacctacgtcataaacaaacagacacccaataagcagatctggttgtctagcccatcatccggtcctaaacggtacgactggaccggcaagaactgggtctactcccatgacggagtcagtcttcatgaactgcttgccgcagagctgaccaaggctcttaagacgaaactggatctctctagcctggcctactccgggaaggatgcatagctcgaggacggggtgaactacgcctgaggatccgatctttttccctctgccaaaaattatggggacatcatgaagccccttgagcatctgacttctggctaataaaggaaatttattttcattgcaatagtgtgttggaattttttgtgtctctcactcggcctaggtagataagtagcatggcgggttaatcattaactacaaggaacccctagtgatggagttggccactccctctctgcgcgctcgctcgctcactgaggccgggcgaccaaaggtcgcccgacgcccgggctttgcccgggcggcctcagtgagcgagcgagcgcgcagccttaattaacctaattcactggccgtcgttttacaacgtcgtgactgggaaaaccctggcgttacccaacttaatcgccttgcagcacatccccctttcgccagctggcgtaatagcgaagaggcccgcaccgatcgcccttcccaacagttgcgcagcctgaatggcgaatgggacgcgccctgtagcggcgcattaagcgcggcgggtgtggtggttacgcgcagcgtgaccgctacacttgccagcgccctagcgcccgctcctttcgctttcttcccttcctttctcgccacgttcgccggctttccccgtcaagctctaaatcgggggctccctttagggttccgatttagtgctttacggcacctcgaccccaaaaaacttgattagggtgatggttcacgtagtgggccatcgccctgatagacggtttttcgccctttgacgttggagtccacgttctttaatagtggactcttgttccaaactggaacaacactcaaccctatctcggtctattcttttgatttataagggattttgccgatttcggcctattggttaaaaaatgagctgatttaacaaaaatttaacgcgaattttaacaaaatattaacgcttacaatttaggtggcacttttcggggaaatgtgcgcggaacccctatttgtttatttttctaaatacattcaaatatgtatccgctcatgagacaataaccctgataaatgcttcaataatattgaaaaaggaagagtatgagtattcaacatttccgtgtcgcccttattcccttttttgcggcattttgccttcctgtttttgctcacccagaaacgctggtgaaagtaaaagatgctgaagatcagttgggtgcacgagtgggttacatcgaactggatctcaacagcggtaagatccttgagagttttcgccccgaagaacgttttccaatgatgagcacttttaaagttctgctatgtggcgcggtattatcccgtattgacgccgggcaagagcaactcggtcgccgcatacactattctcagaatgacttggttgagtactcaccagtcacagaaaagcatcttacggatggcatgacagtaagagaattatgcagtgctgccataaccatgagtgataacactgcggccaacttacttctgacaacgatcggaggaccgaaggagctaaccgcttttttgcacaacatgggggatcatgtaactcgccttgatcgttgggaaccggagctgaatgaagccataccaaacgacgagcgtgacaccacgatgcctgtagcaatggcaacaacgttgcgcaaactattaactggcgaactacttactctagcttcccggcaacaattaatagactggatggaggcggataaagttgcaggaccacttctgcgctcggcccttccggctggctggtttattgctgataaatctggagccggtgagcgtgggtctcgcggtatcattgcagcactggggccagatggtaagccctcccgtatcgtagttatctacacgacggggagtcaggcaactatggatgaacgaaatagacagatcgctgagataggtgcctcactgattaagcattggtaactgtcagaccaagtttactcatatatactttagattgatttaaaacttcatttttaatttaaaaggatctaggtgaagatcctttttgataatctcatgaccaaaatcccttaacgtgagttttcgttccactgagcgtcagaccccgtagaaaagatcaaaggatcttcttgagatcctttttttctgcgcgtaatctgctgcttgcaaacaaaaaaaccaccgctaccagcggtggtttgtttgccggatcaagagctaccaactctttttccgaaggtaactggcttcagcagagcgcagataccaaatactgttcttctagtgtagccgtagttaggccaccacttcaagaactctgtagcaccgcctacatacctcgctctgctaatcctgttaccagtggctgctgccagtggcgataagtcgtgtcttaccgggttggactcaagacgatagttaccggataaggcgcagcggtcgggctgaacggggggttcgtgcacacagcccagcttggagcgaacgacctacaccgaactgagatacctacagcgtgagctatgagaaagcgccacgcttcccgaagggagaaaggcggacaggtatccggtaagcggcagggtcggaacaggagagcgcacgagggagcttccagggggaaacgcctggtatctttatagtcctgtcgggtttcgccacctctgacttgagcgtcgatttttgtgatgctcgtcaggggggcggagcctatggaaaaacgccagcaacgcggcctttttacggttcctggccttttgctggccttttgctcacatgttctttcctgcgttatcccctgattctgtggataaccgtattaccgcctttgagtgagctgataccgctcgccgcagccgaacgaccgagcgcagcgagtcagtgagcgaggaagcggaagagcgcccaatacgcaaaccgcctctccccgcgcgttggccgattcattaatgcagctggcacgacaggtttcccgactggaaagcgggcagtgagcgcaacgcaattaatgtgagttagctcactcattaggcaccccaggctttacactttatgcttccggctcgtatgttgtgtggaattgtgagcggataa

SEQ ID NO: 88 - DNA, 4653 bp, Artificial Sequence
  Description of Artificial Sequence: Synthetic polynucleotide
caatttcacacaggaaacagctatgaccatgattacgccagatttaattaaggccttaattaggctgcgcgctcgctcgctcactgaggccgcccgggcaaagcccgggcgtcgggcgacctttggtcgcccggcctcagtgagcgagcgagcgcgcagagagggagtgtagccatgctctaggaagatcaattcaattcacgcgtactatagtccacggggttggggttgcgccttttccaaggcagccctgggtttgcgcagggacgcggctgctctgggcgtggttccgggaaacgcagcggcgccgaccctgggtctcgcacattcttcacgtccgttcgcagcgtcacccggatcttcgccgctacccttgtgggccccccggcgacgcttcctcgtccgcccctaagtcgggaaggttccttgcggttcgcggcgtgccggacgtgacaaacggaagccgcacgtctcactagtaccctcgcagacggacagcgccagggagcaatggcagcgcgccgaccgcgatgggctgtggccaatagcggctgctcagcagggcgcgccgagagcagcggccgggaaggggcggtgcgggaggcggggtgtggggcggtagtgtgggccctgttcctgcccgcgcggtgttccgcattctgcaagcctccggagcgcacgtcggcagtcggctccctcgttgaccgaatcaccgacctctctccccacgggagcaagcttgaactgaaaaaccagaaagttaactggtaagtttagtctttttgtcttttatttcaggtcccggatccggtggtggtgcaaatcaaagaactgctcctcagtggatgttgcctttacttctaggcctgtacggaagtgttacttctgctctaaaagctgcggaattgtacccgcggccgatccaccggtatgtggactctcgggcgacgcgccgtagccggtctcctggcttccccaagccctgcacaggcacagaccctcacacgggtcccacggccagctgaattggccccactctgcggtcgccggggcctgcgaaccgatatagacgcaacgtgcactccccgacgagcaagttccaaccagagagggctcaaccagatttggaacgtcaagaagcagagtgtctatttgatgaatctgagaaaatccgggacccttgggcaccccggatctcttgatgaaactacctatgaaaggctggccgaggagacgctggactctctggcagagttcttcgaggatctggcagacaagccatacacgtttgaggactatgatgtctcttttggatctggcgtcctgacggttaaactgggaggggatctcggaacctacgttatcaacaaacagactcccaataagcagatctggttgtctagtccatccagtggtcctaaacgctatgactggacgggcaagaactgggtgtactcccacgacggagttagccttcatgaactgctggccgcagagctgactaaagctcttaagactaaactggatctctctagcctggcctactccgggaaagatgcctagctcgaggacggggtgaactacgcctgaggatccgatctttttccctctgccaaaaattatggggacatcatgaagccccttgagcatctgacttctggctaataaaggaaatttattttcattgcaatagtgtgttggaattttttgtgtctctcactcggcctaggtagataagtagcatggcgggttaatcattaactacaaggaacccctagtgatggagttggccactccctctctgcgcgctcgctcgctcactgaggccgggcgaccaaaggtcgcccgacgcccgggctttgcccgggcggcctcagtgagcgagcgagcgcgcagccttaattaacctaattcactggccgtcgttttacaacgtcgtgactgggaaaaccctggcgttacccaacttaatcgccttgcagcacatccccctttcgccagctggcgtaatagcgaagaggcccgcaccgatcgcccttcccaacagttgcgcagcctgaatggcgaatgggacgcgccctgtagcggcgcattaagcgcggcgggtgtggtggttacgcgcagcgtgaccgctacacttgccagcgccctagcgcccgctcctttcgctttcttcccttcctttctcgccacgttcgccggctttccccgtcaagctctaaatcgggggctccctttagggttccgatttagtgctttacggcacctcgaccccaaaaaacttgattagggtgatggttcacgtagtgggccatcgccctgatagacggtttttcgccctttgacgttggagtccacgttctttaatagtggactcttgttccaaactggaacaacactcaaccctatctcggtctattcttttgatttataagggattttgccgatttcggcctattggttaaaaaatgagctgatttaacaaaaatttaacgcgaattttaacaaaatattaacgcttacaatttaggtggcacttttcggggaaatgtgcgcggaacccctatttgtttatttttctaaatacattcaaatatgtatccgctcatgagacaataaccctgataaatgcttcaataatattgaaaaaggaagagtatgagtattcaacatttccgtgtcgcccttattcccttttttgcggcattttgccttcctgtttttgctcacccagaaacgctggtgaaagtaaaagatgctgaagatcagttgggtgcacgagtgggttacatcgaactggatctcaacagcggtaagatccttgagagttttcgccccgaagaacgttttccaatgatgagcacttttaaagttctgctatgtggcgcggtattatcccgtattgacgccgggcaagagcaactcggtcgccgcatacactattctcagaatgacttggttgagtactcaccagtcacagaaaagcatcttacggatggcatgacagtaagagaattatgcagtgctgccataaccatgagtgataacactgcggccaacttacttctgacaacgatcggaggaccgaaggagctaaccgcttttttgcacaacatgggggatcatgtaactcgccttgatcgttgggaaccggagctgaatgaagccataccaaacgacgagcgtgacaccacgatgcctgtagcaatggcaacaacgttgcgcaaactattaactggcgaactacttactctagcttcccggcaacaattaatagactggatggaggcggataaagttgcaggaccacttctgcgctcggcccttccggctggctggtttattgctgataaatctggagccggtgagcgtgggtctcgcggtatcattgcagcactggggccagatggtaagccctcccgtatcgtagttatctacacgacggggagtcaggcaactatggatgaacgaaatagacagatcgctgagataggtgcctcactgattaagcattggtaactgtcagaccaagtttactcatatatactttagattgatttaaaacttcatttttaatttaaaaggatctaggtgaagatcctttttgataatctcatgaccaaaatcccttaacgtgagttttcgttccactgagcgtcagaccccgtagaaaagatcaaaggatcttcttgagatcctttttttctgcgcgtaatctgctgcttgcaaacaaaaaaaccaccgctaccagcggtggtttgtttgccggatcaagagctaccaactctttttccgaaggtaactggcttcagcagagcgcagataccaaatactgttcttctagtgtagccgtagttaggccaccacttcaagaactctgtagcaccgcctacatacctcgctctgctaatcctgttaccagtggctgctgccagtggcgataagtcgtgtcttaccgggttggactcaagacgatagttaccggataaggcgcagcggtcgggctgaacggggggttcgtgcacacagcccagcttggagcgaacgacctacaccgaactgagatacctacagcgtgagctatgagaaagcgccacgcttcccgaagggagaaaggcggacaggtatccggtaagcggcagggtcggaacaggagagcgcacgagggagcttccagggggaaacgcctggtatctttatagtcctgtcgggtttcgccacctctgacttgagcgtcgatttttgtgatgctcgtcaggggggcggagcctatggaaaaacgccagcaacgcggcctttttacggttcctggccttttgctggccttttgctcacatgttctttcctgcgttatcccctgattctgtggataaccgtattaccgcctttgagtgagctgataccgctcgccgcagccgaacgaccgagcgcagcgagtcagtgagcgaggaagcggaagagcgcccaatacgcaaaccgcctctccccgcgcgttggccgattcattaatgcagctggcacgacaggtttcccgactggaaagcgggcagtgagcgcaacgcaattaatgtgagttagctcactcattaggcaccccaggctttacactttatgcttccggctcgtatgttgtgtggaattgtgagcggataa

SEQ ID NO: 89 - DNA, 4653 bp, Artificial Sequence
  Description of Artificial Sequence: Synthetic polynucleotide
caatttcacacaggaaacagctatgaccatgattacgccagatttaattaaggccttaattaggctgcgcgctcgctcgctcactgaggccgcccgggcaaagcccgggcgtcgggcgacctttggtcgcccggcctcagtgagcgagcgagcgcgcagagagggagtgtagccatgctctaggaagatcaattcaattcacgcgtactatagtccacggggttggggttgcgccttttccaaggcagccctgggtttgcgcagggacgcggctgctctgggcgtggttccgggaaacgcagcggcgccgaccctgggtctcgcacattcttcacgtccgttcgcagcgtcacccggatcttcgccgctacccttgtgggccccccggcgacgcttcctcgtccgcccctaagtcgggaaggttccttgcggttcgcggcgtgccggacgtgacaaacggaagccgcacgtctcactagtaccctcgcagacggacagcgccagggagcaatggcagcgcgccgaccgcgatgggctgtggccaatagcggctgctcagcagggcgcgccgagagcagcggccgggaaggggcggtgcgggaggcggggtgtggggcggtagtgtgggccctgttcctgcccgcgcggtgttccgcattctgcaagcctccggagcgcacgtcggcagtcggctccctcgttgaccgaatcaccgacctctctccccacgggagcaagcttgaactgaaaaaccagaaagttaactggtaagtttagtctttttgtcttttatttcaggtcccggatccggtggtggtgcaaatcaaagaactgctcctcagtggatgttgcctttacttctaggcctgtacggaagtgttacttctgctctaaaagctgcggaattgtacccgcggccgatccaccggtatgtggactctggggcgacgcgccgtggccgggctcctggcatccccatcccctgcgcaggcgcaaaccctcacacgggttccacggccagctgaactggccccactgtgcggccggcggggcctgagaacagatattgacgcaacgtgcactcccagaagagccagcagcaaccagagggggttgaatcagatctggaacgtcaagaagcagtcagtgtacctgatgaatctccgaaaaagcgggacccttggtcaccccggatctctcgatgaaaccacatatgaacggctggccgaggaaacgctggactccctggccgagttcttcgaggacctggcagacaagccgtacaccttcgaagactatgatgtttcattcggaagtggcgtgctgacggtcaaactgggaggcgatctgggaacctacgttataaacaaacagactcccaataaacagatctggttgtctagtccatccagcggtcctaaacgctatgactggacgggcaagaactgggtctactcccacgacggagttagccttcacgaactgttggccgcagagctgacaaaggcgcttaagacgaaactggatctctctagcctggcctactccggcaaagatgcctagctcgaggacggggtgaactacgcctgaggatccgatctttttccctctgccaaaaattatggggacatcatgaagccccttgagcatctgacttctggctaataaaggaaatttattttcattgcaatagtgtgttggaattttttgtgtctctcactcggcctaggtagataagtagcatggcgggttaatcattaactacaaggaacccctagtgatggagttggccactccctctctgcgcgctcgctcgctcactgaggccgggcgaccaaaggtcgcccgacgcccgggctttgcccgggcggcctcagtgagcgagcgagcgcgcagccttaattaacctaattcactggccgtcgttttacaacgtcgtgactgggaaaaccctggcgttacccaacttaatcgccttgcagcacatccccctttcgccagctggcgtaatagcgaagaggcccgcaccgatcgcccttcccaacagttgcgcagcctgaatggcgaatgggacgcgccctgtagcggcgcattaagcgcggcgggtgtggtggttacgcgcagcgtgaccgctacacttgccagcgccctagcgcccgctcctttcgctttcttcccttcctttctcgccacgttcgccggctttccccgtcaagctctaaatcgggggctccctttagggttccgatttagtgctttacggcacctcgaccccaaaaaacttgattagggtgatggttcacgtagtgggccatcgccctgatagacggtttttcgccctttgacgttggagtccacgttctttaatagtggactcttgttccaaactggaacaacactcaaccctatctcggtctattcttttgatttataagggattttgccgatttcggcctattggttaaaaaatgagctgatttaacaaaaatttaacgcgaattttaacaaaatattaacgcttacaatttaggtggcacttttcggggaaatgtgcgcggaacccctatttgtttatttttctaaatacattcaaatatgtatccgctcatgagacaataaccctgataaatgcttcaataatattgaaaaaggaagagtatgagtattcaacatttccgtgtcgcccttattcccttttttgcggcattttgccttcctgtttttgctcacccagaaacgctggtgaaagtaaaagatgctgaagatcagttgggtgcacgagtgggttacatcgaactggatctcaacagcggtaagatccttgagagttttcgccccgaagaacgttttccaatgatgagcacttttaaagttctgctatgtggcgcggtattatcccgtattgacgccgggcaagagcaactcggtcgccgcatacactattctcagaatgacttggttgagtactcaccagtcacagaaaagcatcttacggatggcatgacagtaagagaattatgcagtgctgccataaccatgagtgataacactgcggccaacttacttctgacaacgatcggaggaccgaaggagctaaccgcttttttgcacaacatgggggatcatgtaactcgccttgatcgttgggaaccggagctgaatgaagccataccaaacgacgagcgtgacaccacgatgcctgtagcaatggcaacaacgttgcgcaaactattaactggcgaactacttactctagcttcccggcaacaattaatagactggatggaggcggataaagttgcaggaccacttctgcgctcggcccttccggctggctggtttattgctgataaatctggagccggtgagcgtgggtctcgcggtatcattgcagcactggggccagatggtaagccctcccgtatcgtagttatctacacgacggggagtcaggcaactatggatgaacgaaatagacagatcgctgagataggtgcctcactgattaagcattggtaactgtcagaccaagtttactcatatatactttagattgatttaaaacttcatttttaatttaaaaggatctaggtgaagatcctttttgataatctcatgaccaaaatcccttaacgtgagttttcgttccactgagcgtcagaccccgtagaaaagatcaaaggatcttcttgagatcctttttttctgcgcgtaatctgctgcttgcaaacaaaaaaaccaccgctaccagcggtggtttgtttgccggatcaagagctaccaactctttttccgaaggtaactggcttcagcagagcgcagataccaaatactgttcttctagtgtagccgtagttaggccaccacttcaagaactctgtagcaccgcctacatacctcgctctgctaatcctgttaccagtggctgctgccagtggcgataagtcgtgtcttaccgggttggactcaagacgatagttaccggataaggcgcagcggtcgggctgaacggggggttcgtgcacacagcccagcttggagcgaacgacctacaccgaactgagatacctacagcgtgagctatgagaaagcgccacgcttcccgaagggagaaaggcggacaggtatccggtaagcggcagggtcggaacaggagagcgcacgagggagcttccagggggaaacgcctggtatctttatagtcctgtcgggtttcgccacctctgacttgagcgtcgatttttgtgatgctcgtcaggggggcggagcctatggaaaaacgccagcaacgcggcctttttacggttcctggccttttgctggccttttgctcacatgttctttcctgcgttatcccctgattctgtggataaccgtattaccgcctttgagtgagctgataccgctcgccgcagccgaacgaccgagcgcagcgagtcagtgagcgaggaagcggaagagcgcccaatacgcaaaccgcctctccccgcgcgttggccgattcattaatgcagctggcacgacaggtttcccgactggaaagcgggcagtgagcgcaacgcaattaatgtgagttagctcactcattaggcaccccaggctttacactttatgcttccggctcgtatgttgtgtggaattgtgagcggataa

SEQ ID NO: 90 - DNA, 4883 bp, Artificial Sequence
  Description of Artificial Sequence: Synthetic polynucleotide
gccttaattaggctgcgcgctcgctcgctcactgaggccgcccgggcaaagcccgggcgtcgggcgacctttggtcgcccggcctcagtgagcgagcgagcgcgcagagagggagtggccaactccatcactaggggttccttgtagttaatgattaacccgccatgctacttatctaccagggtaatggggatcctctagaactatagctagtcgacattgattattgactagttattaatagtaatcaattacggggtcattagttcatagcccatatatggagttccgcgttacataacttacggtaaatggcccgcctggctgaccgcccaacgacccccgcccattgacgtcaataatgacgtatgttcccatagtaacgccaatagggactttccattgacgtcaatgggtggagtatttacggtaaactgcccacttggcagtacatcaagtgtatcatatgccaagtacgccccctattgacgtcaatgacggtaaatggcccgcctggcattatgcccagtacatgaccttatgggactttcctacttggcagtacatctacgtattagtcatcgctattaccatgtcgaggccacgttctgcttcactctccccatctcccccccctccccacccccaattttgtatttatttattttttaattattttgtgcagcgatgggggcggggggggggggcgcgcgccaggcggggcggggcggggcgaggggcggggcggggcgaggcggagaggtgcggcggcagccaatcagagcggcgcgctccgaaagtttccttttatggcgaggcggcggcggcggcggccctataaaaagcgaagcgcgcggcgggcgggagcaagcttgaactgaaaaaccagaaagttaactggtaagtttagtctttttgtcttttatttcaggtcccggatccggtggtggtgcaaatcaaagaactgctcctcagtggatgttgcctttacttctaggcctgtacggaagtgttacttctgctctaaaagctgcggaattgtacccgcggccgatccaccggtatgtggactctcgggcgccgcgcagtagccggcctcctggcgtcacccagcccagcccaggcccagaccctcacccgggtcccgcggccggcagagttggccccactctgcggccgccgtggcctgcgcaccgacatcgatgcgacctgcacgccccgccgcgcaagttcgaaccaacgtggcctcaaccagatttggaatgtcaaaaagcagagtgtctatttgatgaatttgaggaaatctggaactttgggccacccaggctctctagatgagaccacctatgaaagactagcagaggaaacgctggactctttagcagagttttttgaagaccttgcagacaagccatacacgtttgaggactatgatgtctcctttgggagtggtgtcttaactgtcaaactgggtggagatctaggaacctatgtgatcaacaagcagacgccaaacaagcaaatctggctatcttctccatccagtggacctaagcgttatgactggactgggaaaaactgggtgtactcccacgacggcgtgtccctccatgagctgctggccgcagagctcactaaagccttaaaaaccaaactggacttgtcttccttggcctattccggaaaagatgcttgactcgaggacggggtgaactacgcctgaggatccgatctttttccctctgccaaaaattatggggacatcatgaagccccttgagcatctgacttctggctaataaaggaaatttattttcattgcaatagtgtgttggaattttttgtgtctctcactcggaagcaattcgttgatctgaatttcgaccacccataatacccattaccctggtagataagtagcatggcgggttaatcattaactacaaggaacccctagtgatggagttggccactccctctctgcgcgctcgctcgctcactgaggccgggcgaccaaaggtcgcccgacgcccgggctttgcccgggcggcctcagtgagcgagcgagcgcgcagccttaattaacctaattcactggccgtcgttttacaacgtcgtgactgggaaaaccctggcgttacccaacttaatcgccttgcagcacatccccctttcgccagctggcgtaatagcgaagaggcccgcaccgatcgcccttcccaacagttgcgcagcctgaatggcgaatgggacgcgccctgtagcggcgcattaagcgcggcgggtgtggtggttacgcgcagcgtgaccgctacacttgccagcgccctagcgcccgctcctttcgctttcttcccttcctttctcgccacgttcgccggctttccccgtcaagctctaaatcgggggctccctttagggttccgatttagtgctttacggcacctcgaccccaaaaaacttgattagggtgatggttcacgtagtgggccatcgccctgatagacggtttttcgccctttgacgttggagtccacgttctttaatagtggactcttgttccaaactggaacaacactcaaccctatctcggtctattcttttgatttataagggattttgccgatttcggcctattggttaaaaaatgagctgatttaacaaaaatttaacgcgaattttaacaaaatattaacgcttacaatttaggtggcacttttcggggaaatgtgcgcggaacccctatttgtttatttttctaaatacattcaaatatgtatccgctcatgagacaataaccctgataaatgcttcaataatattgaaaaaggaagagtatgagtattcaacatttccgtgtcgcccttattcccttttttgcggcattttgccttcctgtttttgctcacccagaaacgctggtgaaagtaaaagatgctgaagatcagttgggtgcacgagtgggttacatcgaactggatctcaacagcggtaagatccttgagagttttcgccccgaagaacgttttccaatgatgagcacttttaaagttctgctatgtggcgcggtattatcccgtattgacgccgggcaagagcaactcggtcgccgcatacactattctcagaatgacttggttgagtactcaccagtcacagaaaagcatcttacggatggcatgacagtaagagaattatgcagtgctgccataaccatgagtgataacactgcggccaacttacttctgacaacgatcggaggaccgaaggagctaaccgcttttttgcacaacatgggggatcatgtaactcgccttgatcgttgggaaccggagctgaatgaagccataccaaacgacgagcgtgacaccacgatgcctgtagcaatggcaacaacgttgcgcaaactattaactggcgaactacttactctagcttcccggcaacaattaatagactggatggaggcggataaagttgcaggaccacttctgcgctcggcccttccggctggctggtttattgctgataaatctggagccggtgagcgtgggtctcgcggtatcattgcagcactggggccagatggtaagccctcccgtatcgtagttatctacacgacggggagtcaggcaactatggatgaacgaaatagacagatcgctgagataggtgcctcactgattaagcattggtaactgtcagaccaagtttactcatatatactttagattgatttaaaacttcatttttaatttaaaaggatctaggtgaagatcctttttgataatctcatgaccaaaatcccttaacgtgagttttcgttccactgagcgtcagaccccgtagaaaagatcaaaggatcttcttgagatcctttttttctgcgcgtaatctgctgcttgcaaacaaaaaaaccaccgctaccagcggtggtttgtttgccggatcaagagctaccaactctttttccgaaggtaactggcttcagcagagcgcagataccaaatactgttcttctagtgtagccgtagttaggccaccacttcaagaactctgtagcaccgcctacatacctcgctctgctaatcctgttaccagtggctgctgccagtggcgataagtcgtgtcttaccgggttggactcaagacgatagttaccggataaggcgcagcggtcgggctgaacggggggttcgtgcacacagcccagcttggagcgaacgacctacaccgaactgagatacctacagcgtgagctatgagaaagcgccacgcttcccgaagggagaaaggcggacaggtatccggtaagcggcagggtcggaacaggagagcgcacgagggagcttccagggggaaacgcctggtatctttatagtcctgtcgggtttcgccacctctgacttgagcgtcgatttttgtgatgctcgtcaggggggcggagcctatggaaaaacgccagcaacgcggcctttttacggttcctggccttttgctggccttttgctcacatgttctttcctgcgttatcccctgattctgtggataaccgtattaccgcctttgagtgagctgataccgctcgccgcagccgaacgaccgagcgcagcgagtcagtgagcgaggaagcggaagagcgcccaatacgcaaaccgcctctccccgcgcgttggccgattcattaatgcagctggcacgacaggtttcccgactggaaagcgggcagtgagcgcaacgcaattaatgtgagttagctcactcattaggcaccccaggctttacactttatgcttccggctcgtatgttgtgtggaattgtgagcggataacaatttcacacaggaaacagctatgaccatgattacgccagatttaattaag

SEQ ID NO: 91 - DNA, 4829 bp, Artificial Sequence
  Description of Artificial Sequence: Synthetic polynucleotide
ctgcgcgctcgctcgctcactgaggccgcccgggcaaagcccgggcgtcgggcgacctttggtcgcccggcctcagtgagcgagcgagcgcgcagagagggagtgtagccatgctctaggaagatcaattcggtacaattcacgcgtcgacattgattattgactagttattaatagtaatcaattacggggtcattagttcatagcccatatatggagttccgcgttacataacttacggtaaatggcccgcctggctgaccgcccaacgacccccgcccattgacgtcaataatgacgtatgttcccatagtaacgccaatagggactttccattgacgtcaatgggtggagtatttacggtaaactgcccacttggcagtacatcaagtgtatcatatgccaagtacgccccctattgacgtcaatgacggtaaatggcccgcctggcattatgcccagtacatgaccttatgggactttcctacttggcagtacatctacgtattagtcatcgctattaccatgtcgaggccacgttctgcttcactctccccatctcccccccctccccacccccaattttgtatttatttattttttaattattttgtgcagcgatgggggcggggggggggggcgcgcgccaggcggggcggggcggggcgaggggcggggcggggcgaggcggagaggtgcggcggcagccaatcagagcggcgcgctccgaaagtttccttttatggcgaggcggcggcggcggcggccctataaaaagcgaagcgcgcggcgggcgggagcaagcttgaactgaaaaaccagaaagttaactggtaagtttagtctttttgtcttttatttcaggtcccggatccggtggtggtgcaaatcaaagaactgctcctcagtggatgttgcctttacttctaggcctgtacggaagtgttacttctgctctaaaagctgcggaattgtacccgcggccgatccaccggtatgtggactctcgggcgccgcgcagtagccggcctcctggcgtcacccagcccagcccaggcccagaccctcacccgggtcccgcggccggcagagttggccccactctgcggccgccgtggcctgcgcaccgacatcgatgcgacctgcacgccccgccgcgcaagttcgaaccaacgtggcctcaaccagatttggaatgtcaaaaagcagagtgtctatttgatgaatttgaggaaatctggaactttgggccacccaggctctctagatgagaccacctatgaaagactagcagaggaaacgctggactctttagcagagttttttgaagaccttgcagacaagccatacacgtttgaggactatgatgtctcctttgggagtggtgtcttaactgtcaaactgggtggagatctaggaacctatgtgatcaacaagcagacgccaaacaagcaaatctggctatcttctccatccagtggacctaagcgttatgactggactgggaaaaactgggtgtactcccacgacggcgtgtccctccatgagctgctggccgcagagctcactaaagccttaaaaaccaaactggacttgtcttccttggcctattccggaaaagatgcttgagcggccctagcgtttaaacgggccctctagagtcgacccgggcggcctcgaggacggggtgaactacgcctgaggatccgatctttttccctctgccaaaaattatggggacatcatgaagccccttgagcatctgacttctggctaataaaggaaatttattttcattgcaatagtgtgttggaattttttgtgtctctcactcggcctaggtagataagtagcatggcgggttaatcattaactacaaggaacccctagtgatggagttggccactccctctctgcgcgctcgctcgctcactgaggccgggcgaccaaaggtcgcccgacgcccgggctttgcccgggcggcctcagtgagcgagcgagcgcgcagccttaattaacctaattcactggccgtcgttttacaacgtcgtgactgggaaaaccctggcgttacccaacttaatcgccttgcagcacatccccctttcgccagctggcgtaatagcgaagaggcccgcaccgatcgcccttcccaacagttgcgcagcctgaatggcgaatgggacgcgccctgtagcggcgcattaagcgcggcgggtgtggtggttacgcgcagcgtgaccgctacacttgccagcgccctagcgcccgctcctttcgctttcttcccttcctttctcgccacgttcgccggctttccccgtcaagctctaaatcgggggctccctttagggttccgatttagtgctttacggcacctcgaccccaaaaaacttgattagggtgatggttcacgtagtgggccatcgccctgatagacggtttttcgccctttgacgttggagtccacgttctttaatagtggactcttgttccaaactggaacaacactcaaccctatctcggtctattcttttgatttataagggattttgccgatttcggcctattggttaaaaaatgagctgatttaacaaaaatttaacgcgaattttaacaaaatattaacgcttacaatttaggtggcacttttcggggaaatgtgcgcggaacccctatttgtttatttttctaaatacattcaaatatgtatccgctcatgagacaataaccctgataaatgcttcaataatattgaaaaaggaagagtatgagtattcaacatttccgtgtcgcccttattcccttttttgcggcattttgccttcctgtttttgctcacccagaaacgctggtgaaagtaaaagatgctgaagatcagttgggtgcacgagtgggttacatcgaactggatctcaacagcggtaagatccttgagagttttcgccccgaagaacgttttccaatgatgagcacttttaaagttctgctatgtggcgcggtattatcccgtattgacgccgggcaagagcaactcggtcgccgcatacactattctcagaatgacttggttgagtactcaccagtcacagaaaagcatcttacggatggcatgacagtaagagaattatgcagtgctgccataaccatgagtgataacactgcggccaacttacttctgacaacgatcggaggaccgaaggagctaaccgcttttttgcacaacatgggggatcatgtaactcgccttgatcgttgggaaccggagctgaatgaagccataccaaacgacgagcgtgacaccacgatgcctgtagcaatggcaacaacgttgcgcaaactattaactggcgaactacttactctagcttcccggcaacaattaatagactggatggaggcggataaagttgcaggaccacttctgcgctcggcccttccggctggctggtttattgctgataaatctggagccggtgagcgtgggtctcgcggtatcattgcagcactggggccagatggtaagccctcccgtatcgtagttatctacacgacggggagtcaggcaactatggatgaacgaaatagacagatcgctgagataggtgcctcactgattaagcattggtaactgtcagaccaagtttactcatatatactttagattgatttaaaacttcatttttaatttaaaaggatctaggtgaagatcctttttgataatctcatgaccaaaatcccttaacgtgagttttcgttccactgagcgtcagaccccgtagaaaagatcaaaggatcttcttgagatcctttttttctgcgcgtaatctgctgcttgcaaacaaaaaaaccaccgctaccagcggtggtttgtttgccggatcaagagctaccaactctttttccgaaggtaactggcttcagcagagcgcagataccaaatactgttcttctagtgtagccgtagttaggccaccacttcaagaactctgtagcaccgcctacatacctcgctctgctaatcctgttaccagtggctgctgccagtggcgataagtcgtgtcttaccgggttggactcaagacgatagttaccggataaggcgcagcggtcgggctgaacggggggttcgtgcacacagcccagcttggagcgaacgacctacaccgaactgagatacctacagcgtgagctatgagaaagcgccacgcttcccgaagggagaaaggcggacaggtatccggtaagcggcagggtcggaacaggagagcgcacgagggagcttccagggggaaacgcctggtatctttatagtcctgtcgggtttcgccacctctgacttgagcgtcgatttttgtgatgctcgtcaggggggcggagcctatggaaaaacgccagcaacgcggcctttttacggttcctggccttttgctggccttttgctcacatgttctttcctgcgttatcccctgattctgtggataaccgtattaccgcctttgagtgagctgataccgctcgccgcagccgaacgaccgagcgcagcgagtcagtgagcgaggaagcggaagagcgcccaatacgcaaaccgcctctccccgcgcgttggccgattcattaatgcagctggcacgacaggtttcccgactggaaagcgggcagtgagcgcaacgcaattaatgtgagttagctcactcattaggcaccccaggctttacactttatgcttccggctcgtatgttgtgtggaattgtgagcggataacaatttcacacaggaaacagctatgaccatgattacgccagatttaattaaggccttaattagg

SEQ ID NO: 92 - DNA, 4883 bp, Artificial Sequence; identical to SEQ ID NO: 12
  Description of Artificial Sequence: Synthetic polynucleotide

SEQ ID NO: 93 - DNA, 4883 bp, Artificial Sequence; identical to SEQ ID NO: 90
  Description of Artificial Sequence: Synthetic polynucleotide

SEQ ID NO: 94 - DNA, 2101 bp, Artificial Sequence
  Description of Artificial Sequence: Synthetic polynucleotide
ctgcgcgctcgctcgctcactgaggccgcccgggcaaagcccgggcgtcgggcgacctttggtcgcccggcctcagtgagcgagcgagcgcgcagagagggagtgtagccatgctctaggaagatcaattcggtacaattcacgcgtcgacattgattattgactctggtcgttacataacttacggtaaatggcccgcctggctgaccgcccaacgaccccgcccattgacgtcaataatgacgtatgttcccatagtaacgccaatagggactttccattgacgtcaatgggtggagtatttacggtaaactgcccacttggcagtacatcaagtgtatcatatgccaagtacgccccctattgacgtcaatgacggtaaatggcccgcctggcattatgcccagtacatgaccttatgggactttcctacttggcagtacatctactcgaggccacgttctgcttcactctccccatctcccccccctccccacccccaattttgtatttatttattttttaattattttgtgcagcgatgggggcggggggggggggggggggggcgcgcgccaggcggggcggggcggggcgaggggcggggcggggcgaggcggagaggtgcggcggcagccaatcagagcggcgcgctccgaaagtttccttttatggcgaggcggcggcggcggcggccctataaaaagcgaagcgcgcggcgggcgggagcgggatcagccaccgcggtggcggccctagagtcgatcgaggaactgaaaaaccagaaagttaactggtaagtttagtctttttgtcttttatttcaggtcccggatccggtggtggtgcaaatcaaagaactgctcctcagtggatgttgcctttacttctaggcctgtacggaagtgttacttctgctctaaaagctgcggaattgtacccgcggccgatccaccggtcgccaccatggtgagcaagggcgaggagctgttcaccggggtggtgcccatcctggtcgagctggacggcgacgtaaacggccacaagttcagcgtgtccggcgagggcgagggcgatgccacctacggcaagctgaccctgaagttcatctgcaccaccggcaagctgcccgtgccctggcccaccctcgtgaccaccctgacctacggcgtgcagtgcttcagccgctaccccgaccacatgaagcagcacgacttcttcaagtccgccatgcccgaaggctacgtccaggagcgcaccatcttcttcaaggacgacggcaactacaagacccgcgccgaggtgaagttcgagggcgacaccctggtgaaccgcatcgagctgaagggcatcgacttcaaggaggacggcaacatcctggggcacaagctggagtacaactacaacagccacaacgtctatatcatggccgacaagcagaagaacggcatcaaggtgaacttcaagatccgccacaacatcgaggacggcagcgtgcagctcgccgaccactaccagcagaacacccccatcggcgacggccccgtgctgctgcccgacaaccactacctgagcacccagtccgccctgagcaaagaccccaacgagaagcgcgatcacatggtcctgctggagttcgtgaccgccgccgggatcactctcggcatggacgagctgtacaagtaaagcggccatcaagcttatcgataccgtcgactagagctcgctgatcagcctcgactgtgccttctagttgccagccatctgttgtttgcccctcccccgtgccttccttgaccctggaaggtgccactcccactgtcctttcctaataaaatgaggaaattgcatcgcattgtctgagtaggtgtcattctattctggggggtggggtggggcaggacagcaagggggaggattgggaagacaattaggtagataagtagcatggcgggttaatcattaactacaaggaacccctagtgatggagttggccactccctctctgcgcgctcgctcgctcactgaggccgggcgaccaaaggtcgcccgacgcccgggctttgcccgggcggcctcagtgagcgagcgagcgcgcag

1-2. (canceled)

3. The polynucleotide of claim 7, wherein the polynucleotide comprises at least one 5′ inverted terminal repeat (ITR), one 3′ inverted terminal repeat ITR, a promoter region, and an enhancer, and wherein said enhancer is a CMV enhancer.

4. The polynucleotide of claim 3, wherein the open reading frame encoding human frataxin is codon optimized.

5-6. (canceled)

7. A polynucleotide encoding human frataxin comprising a sequence having at least 95% identity to a sequence selected from the group consisting of SEQ ID NOs 1-94 or variants thereof.

8. The polynucleotide of claim 7, comprising a sequence having at least 99% identity to a sequence selected from the group consisting of SEQ ID NOs 1-94 or variants thereof.

9. A polynucleotide comprising a sequence selected from the group consisting of SEQ ID NOs 1-94, wherein the frataxin payload is replaced by gene encoding a CNS protein of interest or a modulatory nucleic acid.

10. The polynucleotide of claim 9, wherein the polynucleotide has at least 95% identity to a sequence selected from the group consisting of SEQ ID NOs 1-94 or variants thereof.

11. (canceled)

12. An AAV particle comprising the polynucleotide of claim 7 packaged in a capsid, said capsid having a serotype selected from the group consisting of AAV1, AAV2, AAV3, AAV4, AAV5, AAV6, AAV7, AAV8, AAV9, AAV9.47, AAV9(hu14), AAV10, AAV11, AAV12, AAVrh8, AAVrh10, AAV-DJ and AAVDJ8.

13-18. (canceled)

19. The method of claim 18, wherein the polynucleotide in packaged in an AAV particle, said AAV particle comprising a capsid having a capsid serotype selected from the group consisting of AAV1, AAV2, AAV3, AAV4, AAV5, AAV6, AAV7, AAV8, AAV9, AAV9.47, AAV9(hu14), AAV10, AAV11, AAV12, AAVrh8, AAVrh10, AAV-DJ and AAVDJ8.

20-24. (canceled)

25. The method of claim 26, wherein increasing the level of protein treats a disease or disorder, wherein the disease or disorder is Friedreich's Ataxia.

26. A method of increasing the level of a protein in the CNS of a subject in need thereof comprising administering to said subject via prolonged infusion an effective amount of an AAV particle comprising a viral genome encoding a sequence selected from the group consisting of SEQ ID NOs 1-94 or a therapeutically effective amount of a polynucleotide comprising a sequence selected from the group consisting of SEQ ID NOs 1-94 wherein the frataxin payload has been replaced by gene encoding a CNS protein of interest or a modulatory nucleic acid.

27. The method of claim 26, wherein the prolonged infusion is by intracerebroventricular (ICV) administration.

28. The method of claim 26, wherein the prolonged infusion is by injection into the ventricular system of the brain.

29. The method of claim 28, wherein the injection to the ventricular system occurs in at least one location selected from the group consisting of the right lateral ventricle, left lateral ventricle, third ventricle, fourth ventricle, interventricular foramina (also called the foramina of Monro), cerebral aqueduct, central canal, median aperture, right lateral aperture, and left lateral aperture, perivascular space.

30-32. (canceled)

33. The method of claim 26, wherein the prolonged infusion is by intrathecal (IT) administration.

34. The method of claim 33, wherein IT administration occurs by injection into the subarachnoid space, and wherein the injection into the subarachnoid space occurs in at least one location selected from the group consisting of the cervical, thoracic, lumbar and sacral regions of the spine, wherein if the injection occurs in the cervical region the injection occurs in a location selected from the group consisting of C1, C2, C3, C4, C5, C6, and C7, wherein if the injection occurs in the thoracic region the injection occurs in a location selected from the group consisting of T1, T2, T3, T3, T4, T5, T6, T7, T8, T9, T10, T11, and T12, wherein if the injection occurs in the lumbar region the injection occurs in a location selected from the group consisting of L1, L2, L3, L4, and L5, and wherein if the injection occurs in the sacral region the injection occurs in a location selected from the group consisting of S1, S2, S3, S4 and S5.

35-41. (canceled)

42. The method of claim 26 wherein the prolonged infusion occurs at a volume selected from the group consisting of, a volume of more than 1 mL, a volume of less than 1 mL, a volume between about 0.1 mL to about 120 mL, a volume of at least 3 mL, a volume of 3 mL, a volume of at least 10 mL, and a volume of 10 mL.

43-48. (canceled)

49. The method of claim 26, wherein the prolonged infusion occurs for at least a duration selection from the group consisting of 0.17, 0.33, 0.5, 0.67, 0.83, 1, 2, 3, 4, 5, 6, 7, 8, 9, 10, 11, 12, 13, 14, 15, 16, 17, 18, 19, 20, 21, 22, 23, 24, 25, 26, 27, 28, 29, 30, 31, 32, 33, 34, 35, and 36 hour(s).

50-53. (canceled)

54. The method of claim 26, wherein the prolonged infusion occurs at a constant rate.

55. The method of claim 26, wherein the prolonged infusion occurs at a ramped rate.

56. The method of claim 55, wherein the ramped rate increases over the duration of the prolonged infusion.

57. The method of claim 26, wherein the prolonged infusion occurs at a complex rate alternating between high and low rates over the duration of the prolonged infusion.

58. (canceled)

59. The method of claim 26, wherein prolonged infusion occurs at a rate between about 0.1 mL/hour and about 25.0 mL/hour, wherein the rate of prolonged infusion is selected from the group consisting of 0.1, 0.2, 0.3, 0.4, 0.5, 0.6, 0.7, 0.8, 0.9, 1.0, 1.1, 1.2, 1.3, 1.4, 1.5, 1.6, 1.7, 1.8, 1.9, 2.0, 2.1, 2.2, 2.3, 2.4, 2.5, 2.6, 2.7, 2.8, 2.9, 3.0, 3.1, 3.2, 3.3, 3.4, 3.5, 3.6, 3.7, 3.8, 3.9, 4.0, 4.1, 4.2, 4.3, 4.4, 4.5, 4.6, 4.7, 4.8, 4.9, 5.0, 5.1, 5.2, 5.3, 5.4, 5.5, 5.6, 5.7, 5.8, 5.9, 6.0, 6.1, 6.2, 6.3, 6.4, 6.5, 6.6, 6.7, 6.8, 6.9, 7.0, 7.1, 7.2, 7.3, 7.4, 7.5, 7.6, 7.7, 7.8, 7.9, 8.0, 8.1, 8.2, 8.3, 8.4, 8.5, 8.6, 8.7, 8.8, 8.9, 9.0, 9.1, 9.2, 9.3, 9.4, 9.5, 9.6, 9.7, 9.8, 9.9, 10.0, 10.1, 10.2, 10.3, 10.4, 10.5, 10.6, 10.7, 10.8, 10.9, 11.0, 11.1, 11.2, 11.3, 11.4, 11.5, 11.6, 11.7, 11.8, 11.9, 12.0, 12.1, 12.2, 12.3, 12.4, 12.5, 12.6, 12.7, 12.8, 12.9, 13.0, 13.1, 13.2, 13.3, 13.4, 13.5, 13.6, 13.7, 13.8, 13.9, 14.0, 14.1, 14.2, 14.3, 14.4, 14.5, 14.6, 14.7, 14.8, 14.9, 15.0, 15.1, 15.2, 15.3, 15.4, 15.5, 15.6, 15.7, 15.8, 15.9, 16.0, 16.1, 16.2, 16.3, 16.4, 16.5, 16.6, 16.7, 16.8, 16.9, 17.0, 17.1, 17.2, 17.3, 17.4, 17.5, 17.6, 17.7, 17.8, 17.9, 18.0, 18.1, 18.2, 18.3, 18.4, 18.5, 18.6, 18.7, 18.8, 18.9, 19.0, 19.1, 19.2, 19.3, 19.4, 19.5, 19.6, 19.7, 19.8, 19.9, 20.0, 20.1, 20.2, 20.3, 20.4, 20.5, 20.6, 20.7, 20.8, 20.9, 21.0, 21.1, 21.2, 21.3, 21.4, 21.5, 21.6, 21.7, 21.8, 21.9, 22.0, 22.1, 22.2, 22.3, 22.4, 22.5, 22.6, 22.7, 22.8, 22.9, 23.0, 23.1, 23.2, 23.3, 23.4, 23.5, 23.6, 23.7, 23.8, 23.9, 24.0, 24.1, 24.2, 24.3, 24.4, 24.5, 24.6, 24.7, 24.8, 24.9, and 25.0 mL/hour.

60-62. (canceled)

63. The method of claim 26, wherein administration comprises a total dose between about 1×10⁶ VG and about 1×10¹⁶ VG, wherein the total dose is selected from the group consisting of about 1×10⁶, 2×10⁶, 3×10⁶, 4×10⁶, 5×10⁶, 6×10⁶, 7×10⁶, 8×10⁶, 9×10⁶, 1×10⁷, 2×10⁷, 3×10⁷, 4×10⁷, 5×10⁷, 6×10⁷, 7×10⁷, 8×10⁷, 9×10⁷, 1×10⁸, 2×10⁸, 3×10⁸, 4×10⁸, 5×10⁸, 6×10⁸, 7×10⁸, 8×10⁸, 9×10⁸, 1×10⁹, 2×10⁹, 3×10⁹, 4×10⁹, 5×10⁹, 6×10⁹, 7×10⁹, 8×10⁹, 9×10⁹, 1×10¹⁰, 2×10¹⁰, 3×10¹⁰, 4×10¹⁰, 5×10¹⁰, 6×10¹⁰, 7×10¹⁰, 8×10¹⁰, 9×10¹⁰, 1×10¹¹, 2×10¹¹, 3×10¹¹, 4×10¹¹, 5×10¹¹, 6×10¹¹, 7×10¹¹, 8×10¹¹, 9×10¹¹, 1×10¹², 2×10¹², 3×10¹², 4×10¹², 5×10¹², 6×10¹², 7×10¹², 8×10¹², 9×10¹², 1×10¹³, 2×10¹³, 3×10¹³, 4×10¹³, 5×10¹³, 6×10¹³, 7×10¹³, 8×10¹³, 9×10¹³, 1×10¹⁴, 2×10¹⁴, 3×10¹⁴, 4×10¹⁴, 5×10¹⁴, 6×10¹⁴, 7×10¹⁴, 8×10¹⁴, 9×10¹⁴, 1×10¹⁵, 2×10¹⁵, 3×10¹⁵, 4×10¹⁵, 5×10¹⁵, 6×10¹⁵, 7×10¹⁵, 8×10¹⁵, 9×10¹⁵, and 1×10¹⁶ VG.

64-67. (canceled)

68. The method of claim 26, wherein the prolonged infusion comprises a composition concentration between about 1×10⁶ VG/mL and about 1×10¹⁶ VG/mL of AAV comprising at least one polynucleotide encoding a payload, wherein the concentration is selected from the group consisting of 1×10⁶, 2×10⁶, 3×10⁶, 4×10⁶, 5×10⁶, 6×10⁶, 7×10⁶, 8×10⁶, 9×10⁶, 1×10⁷, 2×10⁷, 3×10⁷, 4×10⁷, 5×10⁷, 6×10⁷, 7×10⁷, 8×10⁷, 9×10⁷, 1×10⁸, 2×10⁸, 3×10⁸, 4×10⁸, 5×10⁸, 6×10⁸, 7×10⁸, 8×10⁸, 9×10⁸, 1×10⁹, 2×10⁹, 3×10⁹, 4×10⁹, 5×10⁹, 6×10⁹, 7×10⁹, 8×10⁹, 9×10⁹, 1×10¹⁰, 2×10¹⁰, 3×10¹⁰, 4×10¹⁰, 5×10¹⁰, 6×10¹⁰, 7×10¹⁰, 8×10¹⁰, 9×10¹⁰, 1×10¹¹, 2×10¹¹, 3×10¹¹, 4×10¹¹, 5×10¹¹, 6×10¹¹, 7×10¹¹, 8×10¹¹, 9×10¹¹, 1×10¹², 2×10¹², 3×10¹², 4×10¹², 5×10¹², 6×10¹², 7×10¹², 8×10¹², 9×10¹², 1×10¹³, 2×10¹³, 3×10¹³, 4×10¹³, 5×10¹³, 6×10¹³, 7×10¹³, 8×10¹³, 9×10¹³, 1×10¹⁴, 2×10¹⁴, 3×10¹⁴, 4×10¹⁴, 5×10¹⁴, 6×10¹⁴, 7×10¹⁴, 8×10¹⁴, 9×10¹⁴, 1×10¹⁵, 2×10¹⁵, 3×10¹⁵, 4×10¹⁵, 5×10¹⁵, 6×10¹⁵, 7×10¹⁵, 8×10¹⁵, 9×10¹⁵, and 1×10¹⁶ VG/mL.

69-78. (canceled)

79. The method of claim 26, further comprising co-administration of intravenous mannitol.

80. (canceled)

81. The method of claim 79, wherein a dose of approximately 0.25 to 1.0 g/kg intravenous mannitol is co-administered, and wherein the dose of intravenous mannitol is selected from the group consisting of 0.25, 0.26, 0.27, 0.28, 0.29, 0.30, 0.31, 0.32, 0.33, 0.34, 0.35, 0.36, 0.37, 0.38, 0.39, 0.40, 0.41, 0.42, 0.43, 0.44, 0.45, 0.46, 0.47, 0.48, 0.49, 0.50, 0.51, 0.52, 0.53, 0.54, 0.55, 0.56, 0.57, 0.58, 0.59, 0.60, 0.61, 0.62, 0.63, 0.64, 0.65, 0.66, 0.67, 0.68, 0.69, 0.70, 0.71, 0.72, 0.73, 0.74, 0.75, 0.76, 0.77, 0.78, 0.79, 0.80, 0.81, 0.82, 0.83, 0.84, 0.85, 0.86, 0.87, 0.88, 0.89, 0.90, 0.91, 0.92, 0.93, 0.94, 0.95, 0.96, 0.97, 0.98, 0.99, and 1.00 g/kg.

82-88. (canceled)

89. The method of claim 26 wherein the AAV comprises a capsid selected from the group consisting of AAV1, AAV2, AAV3, AAV4, AAV5, AAV6, AAV7, AAV8, AAV9, AAV10, AAV11, AAV12, AAVrh8, AAVrh10, AAV-DJ, and AAV-DJ8.

90. The method of claim 89, wherein the AAV comprises a self-complementary (SC) genome.

91. The method of claim 89, wherein the AAV comprises a single stranded (SS) genome.

92-93. (canceled)

94. The method of claim 26, wherein the subject is in a position selected from the group consisting of horizontal for the duration of the prolonged infusion, vertical for the duration of the prolonged infusion, at an angle between approximately horizontal 0° to about vertical 90° for the duration of the prolonged infusion, the position of the subject changes during the duration of the prolonged infusion from horizontal to vertical, and the position of the subject changes during the duration of the prolonged infusion from vertical to horizontal.

95-101. (canceled)
